(19) United States
(12) Patent Application Publication
(10) Pub. No.: US 2022/0242957 A1
(43) Pub. Date: Aug. 4, 2022

(54) CSF1R/CCR2 MULTISPECIFIC ANTIBODIES

(71) Applicant: MARENGO THERAPEUTICS, INC., Cambridge, MA (US)

(72) Inventors: Andreas LOEW, Cambridge, MA (US); Brian Edward VASH, Cambridge, MA (US); Stephanie J. MAIOCCO, Cambridge, MA (US); Peter MAREK, Cambridge, MA (US)

(21) Appl. No.: 17/280,766

(22) PCT Filed: Sep. 27, 2019
(86) PCT No.: PCT/US2019/053544

§ 371 Date: Mar. 26, 2021

Related U.S. Application Data
(60) Provisional application No. 62/737,742, filed on Sep. 27, 2018.
(60) Provisional application No. 62/750,163, filed on Oct. 24, 2018.
(60) Provisional application No. 62/776,820, filed on Dec. 7, 2018.

(51) Int. Cl. C07K 16/28; C07K 16/46; A61P 35/00

(52) U.S. Cl. CPC C07K 16/2866; C07K 16/2893; C07K 16/2896; A61K 2039/507; C07K 16/2827; A61P 35/00; C07K 16/468

(57) ABSTRACT

Molecules, e.g., multispecific molecules, targeting CSF1R or CCR2 and methods of using the same, are disclosed.

### RELATED APPLICATIONS

[0001] This application is a U.S. National Phase Application under 35 U.S.C. § 371 of International Application No. PCT/US2019/053544 filed Sep. 27, 2019, which claims priority to U.S. Provisional Application 62/737,742 filed on Sep. 27, 2018, U.S. Provisional Application 62/750,163 filed on Oct. 24, 2018, and U.S. Provisional Application 62/776,820 filed on Dec. 7, 2018, the entire contents of each of which are hereby incorporated by reference.

### SEQUENCE LISTING

[0002] The instant application contains a Sequence Listing which has been submitted electronically in ASCII format and is hereby incorporated by reference in its entirety. Said ASCII copy, created on Sep. 27, 2019, is named 53676_728_601_Seq_Listing.txt and is 711,029 bytes in size.

### BACKGROUND

[0003] Multispecific molecules targeting tumor associated macrophages (TAMs) or myeloid derived suppressor cells (MDSCs) and methods of using the same, are disclosed.

### SUMMARY OF THE INVENTION

[0004] The disclosure relates, inter alia, to novel multispecific molecules comprising: (i) a first immunosuppressive myeloid cell (IMC) binding moiety (e.g., a first tumor associated macrophage (TAM) binding moiety; or a first myeloid derived suppressor cell (MDSC) binding moiety) (e.g., an antibody molecule); and (ii) a second IMC binding moiety (e.g., a first TAM binding moiety; or a second MDSC binding moiety) (e.g., an antibody molecule), wherein the first and the second IMC (e.g., TAM or MDSC) binding moieties are different. Without being bound by theory, the multispecific molecules disclosed herein are expected to deplete TAMs and/or MDSCs. Accordingly, provided herein are, inter alia, multispecific molecules (e.g., multispecific antibody molecules) that include the aforesaid moieties, nucleic acids encoding the same, methods of producing the aforesaid molecules, and methods of treating a cancer using the aforesaid molecules.

[0005] In one aspect, provided herein are isolated multispecific, e.g., a bispecific, molecules, comprising: (i) a first immunosuppressive myeloid cell (IMC) binding moiety (e.g., a first tumor associated macrophage (TAM) binding moiety; or a first myeloid derived suppressor cell (MDSC) binding moiety) (e.g., an antibody molecule); and (ii) a second IMC binding moiety (e.g., a second TAM binding moiety; or a second MDSC binding moiety) (e.g., an antibody molecule), wherein the first and the second IMC (e.g., TAM or MDSC) binding moieties are different. In some embodiments, the first and the second IMC (e.g., TAM or MDSC) binding moieties bind to different epitopes. In some embodiments, the first and the second IMC (e.g., TAM or MDSC) binding moieties bind to different antigens.

[0006] In some embodiments, the first IMC binding moiety is a first MDSC binding moiety; and the second IMC binding moiety is a second MDSC binding moiety. In some embodiments, the first IMC binding moiety is a first TAM binding moiety; and the second IMC binding moiety is a second TAM binding moiety. In some embodiments, the first TAM binding moiety binds to CSF1R, CCR2, CXCR2, CD86, CD163, CX3CR1, MARCO, CD204, CD52, folate receptor beta, or PD-L1; and the second TAM binding moiety binds to CCR2, CSF1R, CXCR2, CD86, CD163, CX3CR1, MARCO, CD204, CD52, folate receptor beta, or PD-L1. In some embodiments, the first TAM binding moiety binds to CSF1R, CCR2, CXCR2, or PD-L1 (e.g., human CSF1R, CCR2, CXCR2, or PD-L1) and the second TAM binding moiety binds to CCR2, CSF1R, CXCR2, or PD-L1 (e.g., human CCR2, CSF1R, CXCR2, or PD-L1). In some embodiments, the first TAM binding moiety binds to CSF1R and the second TAM binding moiety binds to CCR2. In some embodiments, the first TAM binding moiety binds to CSF1R and the second TAM binding moiety binds to CXCR2. In some embodiments, the first TAM binding moiety binds to CCR2 and the second TAM binding moiety binds to CXCR2. In some embodiments, the first TAM binding moiety binds to CSF1R and the second TAM binding moiety binds to PD-L1. In some embodiments, the first TAM binding moiety binds to CCR2 and the second TAM binding moiety binds to PD-L1. In some embodiments, the first TAM binding moiety binds to CXCR2 and the second TAM binding moiety binds to PD-L1.

[0007] In some embodiments, the first TAM binding moiety binds to CSF1R, CCR2, CXCR2, or PD-L1 with a dissociation constant of less than about 10 nM, and more typically, 10-100 pM; and the second TAM binding moiety binds to CCR2, CSF1R, CXCR2, or PD-L1 with a dissociation constant of less than about 10 nM, and more typically, 10-100 pM. In some embodiments, the first TAM binding moiety binds to a conformational or a linear epitope on CSF1R, CCR2, CXCR2, or PD-L1; and the second TAM binding moiety binds to a conformational or a linear epitope on CCR2, CSF1R, CXCR2, or PD-L1.

[0008] In some embodiments, the multispecific molecule comprises at least two non-contiguous polypeptide chains. In some embodiments, the first IMC binding moiety comprises a first anti-IC antibody molecule and/or the second IMC binding moiety comprises a second anti-IMC antibody molecule. In some embodiments, the first anti-IMC antibody molecule and the second anti-IMC antibody molecule are, independently, a full antibody (e.g., an antibody that includes at least one, and preferably two, complete heavy chains, and at least one, and preferably two, complete light chains), or an antigen-binding fragment (e.g., a Fab, F(ab′)2, Fv, a scFv, a single domain antibody, or a diabody (dAb)).

[0009] In some embodiments, the first anti-IMC antibody molecule and/or the second anti-IMC antibody molecule comprises a heavy chain constant region chosen from IgG1, IgG2, IgG3, or IgG4, or a fragment thereof.

[0010] In some embodiments, the first anti-IMC antibody molecule and/or the second anti-IMC antibody molecule comprises a light chain constant region chosen from the light chain constant regions of kappa or lambda, or a fragment thereof. In some embodiments, the first anti-IMC antibody molecule comprises a kappa light chain constant region, or a fragment thereof, and the second anti-IMC antibody molecule comprises a lambda light chain constant region, or a fragment thereof. In some embodiments, the first anti-IMC antibody molecule comprises a lambda light chain constant region, or a fragment thereof, and the second anti-IMC antibody molecule comprises a kappa light chain constant region, or a fragment thereof. In some embodiments, the first anti-IMC antibody molecule and the second anti-IMC antibody molecule have a common light chain variable region.

[0011] In some embodiments the multispecific molecule further comprises a heavy chain constant region (e.g., an Fc region) chosen from the heavy chain constant regions of IgG1, IgG2, and IgG4, more particularly, the heavy chain constant region of human IgG1, IgG2 or IgG4. In some embodiments, the heavy chain constant region (e.g., an Fc region) is linked to, e.g., covalently linked to, one or both of the first anti-IMC antibody molecule and the second anti-IMC antibody molecule. In some embodiments, the heavy chain constant region (e.g., an Fc region) is altered, e.g., mutated, to increase or decrease one or more of: Fc receptor binding, antibody glycosylation, the number of cysteine residues, effector cell function, or complement function. In some embodiments, an interface of a first and second heavy chain constant regions (e.g., Fc region) is altered, e.g., mutated, to increase or decrease dimerization, e.g., relative to a non-engineered interface. In some embodiments, the dimerization of the heavy chain constant region (e.g., Fc region) is enhanced by providing an Fc interface of a first and a second Fc region with one or more of: a paired cavity-protuberance (“knob-in-a hole”), an electrostatic interaction, or a strand-exchange, such that a greater ratio of heteromultimer:homomultimer forms, e.g., relative to a non-engineered interface. In some embodiments, the heavy chain constant region (e.g., Fc region) comprises an amino acid substitution at a position chosen from one or more of 347, 349, 350, 351, 366, 368, 370, 392, 394, 395, 397, 398, 399, 405, 407, or 409, e.g., of the Fc region of human IgG1, numbered based on the Eu numbering system. In some embodiments, the heavy chain constant region (e.g., Fc region) comprises an amino acid substitution chosen from: T366S, L368A, or Y407V (e.g., corresponding to a cavity or hole), or T366W (e.g., corresponding to a protuberance or knob), or a combination thereof, numbered based on the Eu numbering system.

[0012] In some embodiments, the heavy chain constant region (e.g., an Fc region) comprises one or more mutations that increase or decrease one or more of: Fc receptor binding, antibody glycosylation, the number of cysteine residues, effector cell function, or complement function, relative to a naturally-existing heavy chain constant region. In some embodiments, the first anti-IMC antibody molecule comprises a first heavy chain constant region (e.g., a first Fc region) and the second anti-IMC antibody molecule comprises a second heavy chain constant region (e.g., a second Fc region), wherein the first heavy chain constant region comprises one or more mutations that increase heterodimerization of the first heavy chain constant region and the second heavy chain constant region, relative to a naturally-existing heavy chain constant region, and/or wherein the second heavy chain constant region comprises one or more mutations that increase heterodimerization of the second heavy chain constant region and the first heavy chain constant region, relative to a naturally-existing heavy chain constant region. In some embodiments, the first and the second heavy chain constant regions (e.g., first and second Fc regions) comprise one or more of: a paired cavity-protuberance (“knob-in-a hole”), an electrostatic interaction, or a strand-exchange, such that a greater ratio of heteromultimer:homomultimer forms, e.g., relative to naturally-existing heavy chain constant regions. In some embodiments, the first and/or second heavy chain constant region (e.g., a first and/or second Fc region, e.g., a first and/or second IgG1 Fc region) comprises an amino acid substitution at a position chosen from one or more of 347, 349, 350, 351, 366, 368, 370, 392, 394, 395, 397, 398, 399, 405, 407, or 409, numbered based on the Eu numbering system. In some embodiments, the first and/or second heavy chain constant region (e.g., a first and/or second Fc region, e.g., a first and/or second IgG1 Fc region) comprises an amino acid substitution chosen from: T366S, L368A, Y407V, or Y349C (e.g., corresponding to a cavity or hole), or T366W or S354C (e.g., corresponding to a protuberance or knob), or a combination thereof, numbered based on the Eu numbering system.

[0013] In some embodiments, the multispecific molecule further comprises a linker, e.g., a linker between one or more of: the first anti-IMC antibody molecule and the second anti-IMC antibody molecule, the first anti-IMC antibody molecule and the heavy chain constant region (e.g., the Fc region), or the second anti-IMC antibody molecule and the heavy chain constant region. In some embodiments, the linker is chosen from: a cleavable linker, a non-cleavable linker, a peptide linker, a flexible linker, a rigid linker, a helical linker, or a non-helical linker. In some embodiments, the linker is a peptide linker. In some embodiments, the peptide linker comprises Gly and Ser.

[0014] In some embodiments, the heavy chain constant region (e.g., Fc region) induces antibody dependent cellular cytotoxicity (ADCC).

[0015] In some embodiments, the first or the second TAM binding moiety is an antibody molecule that binds to CSF1R and comprises one, two, or three CDRs from the heavy chain variable region sequence of: SEQ ID NO: 48, SEQ ID NO: 66, or SEQ ID NO: 69, or a closely related CDR, e.g., CDRs which have at least one amino acid alteration, but not more than two, three or four alterations (e.g., substitutions, deletions, or insertions, e.g., conservative substitutions) from a CDR of SEQ ID NO: 48, SEQ ID NO: 66, or SEQ ID NO: 69; and/or comprises one, two, or three CDRs from the light chain variable region sequence of: SEQ ID NO: 50, SEQ ID NO: 67, or SEQ ID NO: 70, or a closely related CDR, e.g., CDRs which have at least one amino acid alteration, but not more than two, three or four alterations (e.g., substitutions, deletions, or insertions, e.g., conservative substitutions) from a CDR of SEQ ID NO: 50, SEQ ID NO: 67, or SEQ ID NO: 70. In some embodiments, the antibody molecule that binds to CSF1R comprises the heavy chain variable region sequence of: SEQ ID NO: 48, SEQ ID NO: 66, or SEQ ID NO: 69, or an amino acid sequence substantially identical thereto (e.g., 95% to 99.9% identical thereto, or having at least one amino acid alteration, but not more than five, ten or fifteen alterations (e.g., substitutions, deletions, or insertions, e.g., conservative substitutions) to the amino acid sequence of SEQ ID NO: 48, SEQ ID NO: 66, or SEQ ID NO: 69; and/or comprises the light chain variable region sequence of: SEQ ID NO: 50, SEQ ID NO: 67, or SEQ ID NO: 70, or an amino acid sequence substantially identical thereto (e.g., 95% to 99.9% identical thereto, or having at least one amino acid alteration, but not more than five, ten or fifteen alterations (e.g., substitutions, deletions, or insertions, e.g., conservative substitutions) to the amino acid sequence of SEQ ID NO: 50, SEQ ID NO: 67, or SEQ ID NO: 70.

[0016] In some embodiments, the first or the second TAM binding moiety is an antibody molecule that binds to CCR2 and comprises one, two, or three CDRs from the heavy chain variable region sequence of: SEQ ID NO: 44, SEQ ID NO: 54, SEQ ID NO: 59, SEQ ID NO: 62, SEQ ID NO: 64, or a closely related CDR, e.g., CDRs which have at least one amino acid alteration, but not more than two, three or four alterations (e.g., substitutions, deletions, or insertions, e.g., conservative substitutions) from a CDR of SEQ ID NO: 44, SEQ ID NO: 54, SEQ ID NO: 59, SEQ ID NO: 62, SEQ ID NO: 64; and/or comprises one, two, or three CDRs from the light chain variable region sequence of: SEQ ID NO: 45, SEQ ID NO: 57, SEQ ID NO: 60, SEQ ID NO: 63, SEQ ID NO: 65, or a closely related CDR, e.g., CDRs which have at least one amino acid alteration, but not more than two, three or four alterations (e.g., substitutions, deletions, or insertions, e.g., conservative substitutions) from a CDR of SEQ ID NO: 45, SEQ ID NO: 57, SEQ ID NO: 60, SEQ ID NO: 63, SEQ ID NO: 65. In some embodiments, the antibody molecule that binds to CCR2 comprises the heavy chain variable region sequence of: SEQ ID NO: 44, SEQ ID NO: 54, SEQ ID NO: 59, SEQ ID NO: 62, SEQ ID NO: 64, or an amino acid sequence substantially identical thereto (e.g., 95% to 99.9% identical thereto, or having at least one amino acid alteration, but not more than five, ten or fifteen alterations (e.g., substitutions, deletions, or insertions, e.g., conservative substitutions) to the amino acid sequence of SEQ ID NO: 44, SEQ ID NO: 54, SEQ ID NO: 59, SEQ ID NO: 62, SEQ ID NO: 64; and/or comprises the light chain variable region sequence of: SEQ ID NO: 45, SEQ ID NO: 57, SEQ ID NO: 60, SEQ ID NO: 63, SEQ ID NO: 65, or an amino acid sequence substantially identical thereto (e.g., 95% to 99.9% identical thereto, or having at least one amino acid alteration, but not more than five, ten or fifteen alterations (e.g., substitutions, deletions, or insertions, e.g., conservative substitutions) to the amino acid sequence of SEQ ID NO: 45, SEQ ID NO: 57, SEQ ID NO: 60, SEQ ID NO: 63, SEQ ID NO: 65.

[0017] In one embodiment, the first TAM binding moiety is an antibody molecule that binds to CCR2 and comprises one, two, or three CDRs from the heavy chain variable region sequence of: SEQ ID NO: 44, or a closely related CDR, e.g., CDRs which have at least one amino acid alteration, but not more than two, three or four alterations (e.g., substitutions, deletions, or insertions, e.g., conservative substitutions) from a CDR of SEQ ID NO: 44; and/or comprises one, two, or three CDRs from the light chain variable region sequence of: SEQ ID NO: 45, or a closely related CDR, e.g., CDRs which have at least one amino acid alteration, but not more than two, three or four alterations (e.g., substitutions, deletions, or insertions, e.g., conservative substitutions) from a CDR of SEQ ID NO: 45; and the second TAM binding moiety is an antibody molecule that binds to CSF1R and comprises one, two, or three CDRs from the heavy chain variable region sequence of: SEQ ID NO: 48, or a closely related CDR, e.g., CDRs which have at least one amino acid alteration, but not more than two, three or four alterations (e.g., substitutions, deletions, or insertions, e.g., conservative substitutions) from a CDR of SEQ ID NO: 48; and/or comprises one, two, or three CDRs from the light chain variable region sequence of: SEQ ID NO: 50, or a closely related CDR, e.g., CDRs which have at least one amino acid alteration, but not more than two, three or four alterations (e.g., substitutions, deletions, or insertions, e.g., conservative substitutions) from a CDR of SEQ ID NO: 50

[0018] In one embodiment, the first TAM binding moiety is an antibody molecule that binds to CCR2 and comprises one, two, or three CDRs from the heavy chain variable region sequence of: SEQ ID NO: 54, or a closely related CDR, e.g., CDRs which have at least one amino acid alteration, but not more than two, three or four alterations (e.g., substitutions, deletions, or insertions, e.g., conservative substitutions) from a CDR of SEQ ID NO: 54; and/or comprises one, two, or three CDRs from the light chain variable region sequence of: SEQ ID NO: 57, or a closely related CDR, e.g., CDRs which have at least one amino acid alteration, but not more than two, three or four alterations (e.g., substitutions, deletions, or insertions, e.g., conservative substitutions) from a CDR of SEQ ID NO: 57; and the second TAM binding moiety is an antibody molecule that binds to CSF1R and comprises one, two, or three CDRs from the heavy chain variable region sequence of: SEQ ID NO: 66, or a closely related CDR, e.g., CDRs which have at least one amino acid alteration, but not more than two, three or four alterations (e.g., substitutions, deletions, or insertions, e.g., conservative substitutions) from a CDR of SEQ ID NO: 66; and/or comprises one, two, or three CDRs from the light chain variable region sequence of: SEQ ID NO: 67, or a closely related CDR, e.g., CDRs which have at least one amino acid alteration, but not more than two, three or four alterations (e.g., substitutions, deletions, or insertions, e.g., conservative substitutions) from a CDR of SEQ ID NO: 67

[0019] In one embodiment, the first TAM binding moiety is an antibody molecule that binds to CCR2 and comprises one, two, or three CDRs from the heavy chain variable region sequence of: SEQ ID NO: 54, or a closely related CDR, e.g., CDRs which have at least one amino acid alteration, but not more than two, three or four alterations (e.g., substitutions, deletions, or insertions, e.g., conservative substitutions) from a CDR of SEQ ID NO: 54; and/or comprises one, two, or three CDRs from the light chain variable region sequence of: SEQ ID NO: 57, or a closely related CDR, e.g., CDRs which have at least one amino acid alteration, but not more than two, three or four alterations (e.g., substitutions, deletions, or insertions, e.g., conservative substitutions) from a CDR of SEQ ID NO: 57; and the second TAM binding moiety is an antibody molecule that binds to CSF1R and comprises one, two, or three CDRs from the heavy chain variable region sequence of: SEQ ID NO: 69, or a closely related CDR, e.g., CDRs which have at least one amino acid alteration, but not more than two, three or four alterations (e.g., substitutions, deletions, or insertions, e.g., conservative substitutions) from a CDR of SEQ ID NO: 69; and/or comprises one, two, or three CDRs from the light chain variable region sequence of: SEQ ID NO: 70, or a closely related CDR, e.g., CDRs which have at least one amino acid alteration, but not more than two, three or four alterations (e.g., substitutions, deletions, or insertions, e.g., conservative substitutions) from a CDR of SEQ ID NO: 70.

[0020] In one embodiment, the first TAM binding moiety is an antibody molecule that binds to CCR2 and comprises one, two, or three CDRs from the heavy chain variable region sequence of: SEQ ID NO: 59, or a closely related CDR, e.g., CDRs which have at least one amino acid alteration, but not more than two, three or four alterations (e.g., substitutions, deletions, or insertions, e.g., conservative substitutions) from a CDR of SEQ ID NO: 59; and/or comprises one, two, or three CDRs from the light chain variable region sequence of: SEQ ID NO: 60, or a closely related CDR, e.g., CDRs which have at least one amino acid alteration, but not more than two, three or four alterations (e.g., substitutions, deletions, or insertions, e.g., conservative substitutions) from a CDR of SEQ ID NO: 60; and the second TAM binding moiety is an antibody molecule that binds to CSF1R and comprises one, two, or three CDRs from the heavy chain variable region sequence of: SEQ ID NO: 66, or a closely related CDR, e.g., CDRs which have at least one amino acid alteration, but not more than two, three or four alterations (e.g., substitutions, deletions, or insertions, e.g., conservative substitutions) from a CDR of SEQ ID NO: 66; and/or comprises one, two, or three CDRs from the light chain variable region sequence of: SEQ ID NO: 67, or a closely related CDR, e.g., CDRs which have at least one amino acid alteration, but not more than two, three or four alterations (e.g., substitutions, deletions, or insertions, e.g., conservative substitutions) from a CDR of SEQ ID NO: 67.

[0021] In one embodiment, the first TAM binding moiety is an antibody molecule that binds to CCR2 and comprises one, two, or three CDRs from the heavy chain variable region sequence of: SEQ ID NO: 59, or a closely related CDR, e.g., CDRs which have at least one amino acid alteration, but not more than two, three or four alterations (e.g., substitutions, deletions, or insertions, e.g., conservative substitutions) from a CDR of SEQ ID NO: 59; and/or comprises one, two, or three CDRs from the light chain variable region sequence of: SEQ ID NO: 60, or a closely related CDR, e.g., CDRs which have at least one amino acid alteration, but not more than two, three or four alterations (e.g., substitutions, deletions, or insertions, e.g., conservative substitutions) from a CDR of SEQ ID NO: 60; and the second TAM binding moiety is an antibody molecule that binds to CSF1R and comprises one, two, or three CDRs from the heavy chain variable region sequence of: SEQ ID NO: 69, or a closely related CDR, e.g., CDRs which have at least one amino acid alteration, but not more than two, three or four alterations (e.g., substitutions, deletions, or insertions, e.g., conservative substitutions) from a CDR of SEQ ID NO: 69; and/or comprises one, two, or three CDRs from the light chain variable region sequence of: SEQ ID NO: 70, or a closely related CDR, e.g., CDRs which have at least one amino acid alteration, but not more than two, three or four alterations (e.g., substitutions, deletions, or insertions, e.g., conservative substitutions) from a CDR of SEQ ID NO: 70.

[0022] In one embodiment, the first TAM binding moiety is an antibody molecule that binds to CCR2 and comprises one, two, or three CDRs from the heavy chain variable region sequence of: SEQ ID NO: 62, or a closely related CDR, e.g., CDRs which have at least one amino acid alteration, but not more than two, three or four alterations (e.g., substitutions, deletions, or insertions, e.g., conservative substitutions) from a CDR of SEQ ID NO: 62; and/or comprises one, two, or three CDRs from the light chain variable region sequence of: SEQ ID NO: 63, or a closely related CDR, e.g., CDRs which have at least one amino acid alteration, but not more than two, three or four alterations (e.g., substitutions, deletions, or insertions, e.g., conservative substitutions) from a CDR of SEQ ID NO: 63; and the second TAM binding moiety is an antibody molecule that binds to CSF1R and comprises one, two, or three CDRs from the heavy chain variable region sequence of: SEQ ID NO: 66, or a closely related CDR, e.g., CDRs which have at least one amino acid alteration, but not more than two, three or four alterations (e.g., substitutions, deletions, or insertions, e.g., conservative substitutions) from a CDR of SEQ ID NO: 66; and/or comprises one, two, or three CDRs from the light chain variable region sequence of: SEQ ID NO: 67, or a closely related CDR, e.g., CDRs which have at least one amino acid alteration, but not more than two, three or four alterations (e.g., substitutions, deletions, or insertions, e.g., conservative substitutions) from a CDR of SEQ ID NO: 67.

[0023] In one embodiment, the first TAM binding moiety is an antibody molecule that binds to CCR2 and comprises one, two, or three CDRs from the heavy chain variable region sequence of: SEQ ID NO: 62, or a closely related CDR, e.g., CDRs which have at least one amino acid alteration, but not more than two, three or four alterations (e.g., substitutions, deletions, or insertions, e.g., conservative substitutions) from a CDR of SEQ ID NO: 62; and/or comprises one, two, or three CDRs from the light chain variable region sequence of: SEQ ID NO: 63, or a closely related CDR, e.g., CDRs which have at least one amino acid alteration, but not more than two, three or four alterations (e.g., substitutions, deletions, or insertions, e.g., conservative substitutions) from a CDR of SEQ ID NO: 63; and the second TAM binding moiety is an antibody molecule that binds to CSF1R and comprises one, two, or three CDRs from the heavy chain variable region sequence of: SEQ ID NO: 69, or a closely related CDR, e.g., CDRs which have at least one amino acid alteration, but not more than two, three or four alterations (e.g., substitutions, deletions, or insertions, e.g., conservative substitutions) from a CDR of SEQ ID NO: 69; and/or comprises one, two, or three CDRs from the light chain variable region sequence of: SEQ ID NO: 70, or a closely related CDR, e.g., CDRs which have at least one amino acid alteration, but not more than two, three or four alterations (e.g., substitutions, deletions, or insertions, e.g., conservative substitutions) from a CDR of SEQ ID NO: 70.

[0024] In one embodiment, the first TAM binding moiety is an antibody molecule that binds to CCR2 and comprises one, two, or three CDRs from the heavy chain variable region sequence of: SEQ ID NO: 64, or a closely related CDR, e.g., CDRs which have at least one amino acid alteration, but not more than two, three or four alterations (e.g., substitutions, deletions, or insertions, e.g., conservative substitutions) from a CDR of SEQ ID NO: 64; and/or comprises one, two, or three CDRs from the light chain variable region sequence of: SEQ ID NO: 65, or a closely related CDR, e.g., CDRs which have at least one amino acid alteration, but not more than two, three or four alterations (e.g., substitutions, deletions, or insertions, e.g., conservative substitutions) from a CDR of SEQ ID NO: 65; and the second TAM binding moiety is an antibody molecule that binds to CSF1R and comprises one, two, or three CDRs from the heavy chain variable region sequence of: SEQ ID NO: 66, or a closely related CDR, e.g., CDRs which have at least one amino acid alteration, but not more than two, three or four alterations (e.g., substitutions, deletions, or insertions, e.g., conservative substitutions) from a CDR of SEQ ID NO: 66; and/or comprises one, two, or three CDRs from the light chain variable region sequence of: SEQ ID NO: 67, or a closely related CDR, e.g., CDRs which have at least one amino acid alteration, but not more than two, three or four alterations (e.g., substitutions, deletions, or insertions, e.g., conservative substitutions) from a CDR of SEQ ID NO: 67.

[0025] In one embodiment, the first TAM binding moiety is an antibody molecule that binds to CCR2 and comprises one, two, or three CDRs from the heavy chain variable region sequence of: SEQ ID NO: 64, or a closely related CDR, e.g., CDRs which have at least one amino acid alteration, but not more than two, three or four alterations (e.g., substitutions, deletions, or insertions, e.g., conservative substitutions) from a CDR of SEQ ID NO: 64; and/or comprises one, two, or three CDRs from the light chain variable region sequence of: SEQ ID NO: 65, or a closely related CDR, e.g., CDRs which have at least one amino acid alteration, but not more than two, three or four alterations (e.g., substitutions, deletions, or insertions, e.g., conservative substitutions) from a CDR of SEQ ID NO: 65; and the second TAM binding moiety is an antibody molecule that binds to CSF1R and comprises one, two, or three CDRs from the heavy chain variable region sequence of: SEQ ID NO: 69, or a closely related CDR, e.g., CDRs which have at least one amino acid alteration, but not more than two, three or four alterations (e.g., substitutions, deletions, or insertions, e.g., conservative substitutions) from a CDR of SEQ ID NO: 69; and/or comprises one, two, or three CDRs from the light chain variable region sequence of: SEQ ID NO: 70, or a closely related CDR, e.g., CDRs which have at least one amino acid alteration, but not more than two, three or four alterations (e.g., substitutions, deletions, or insertions, e.g., conservative substitutions) from a CDR of SEQ ID NO: 70

[0026] In one embodiment, the first TAM binding moiety is an antibody molecule that binds to CCR2 and comprises the heavy chain variable region sequence of: SEQ ID NO: 44, or an amino acid sequence substantially identical thereto (e.g., 95% to 99.9% identical thereto, or having at least one amino acid alteration, but not more than five, ten or fifteen alterations (e.g., substitutions, deletions, or insertions, e.g., conservative substitutions) to the amino acid sequence of SEQ ID NO: 44; and/or comprises the light chain variable region sequence of: SEQ ID NO: 45, or an amino acid sequence substantially identical thereto (e.g., 95% to 99.9% identical thereto, or having at least one amino acid alteration, but not more than five, ten or fifteen alterations (e.g., substitutions, deletions, or insertions, e.g., conservative substitutions) to the amino acid sequence of SEQ ID NO: 45; and the second TAM binding moiety is an antibody molecule that binds to CSF1R and comprises the heavy chain variable region sequence of: SEQ ID NO: 48, or an amino acid sequence substantially identical thereto (e.g., 95% to 99.9% identical thereto, or having at least one amino acid alteration, but not more than five, ten or fifteen alterations (e.g., substitutions, deletions, or insertions, e.g., conservative substitutions) to the amino acid sequence of SEQ ID NO: 48; and/or comprises the light chain variable region sequence of: SEQ ID NO: 50, or an amino acid sequence substantially identical thereto (e.g., 95% to 99.9% identical thereto, or having at least one amino acid alteration, but not more than five, ten or fifteen alterations (e.g., substitutions, deletions, or insertions, e.g., conservative substitutions) to the amino acid sequence of SEQ ID NO: 50.

[0027] In one embodiment, the first TAM binding moiety is an antibody molecule that binds to CCR2 and comprises the heavy chain variable region sequence of: SEQ ID NO: 54, or an amino acid sequence substantially identical thereto (e.g., 95% to 99.9% identical thereto, or having at least one amino acid alteration, but not more than five, ten or fifteen alterations (e.g., substitutions, deletions, or insertions, e.g., conservative substitutions) to the amino acid sequence of SEQ ID NO: 54; and/or comprises the light chain variable region sequence of: SEQ ID NO: 57, or an amino acid sequence substantially identical thereto (e.g., 95% to 99.9% identical thereto, or having at least one amino acid alteration, but not more than five, ten or fifteen alterations (e.g., substitutions, deletions, or insertions, e.g., conservative substitutions) to the amino acid sequence of SEQ ID NO: 57; and the second TAM binding moiety is an antibody molecule that binds to CSF1R and comprises the heavy chain variable region sequence of: SEQ ID NO: 66, or an amino acid sequence substantially identical thereto (e.g., 95% to 99.9% identical thereto, or having at least one amino acid alteration, but not more than five, ten or fifteen alterations (e.g., substitutions, deletions, or insertions, e.g., conservative substitutions) to the amino acid sequence of SEQ ID NO: 66; and/or comprises the light chain variable region sequence of: SEQ ID NO: 67, or an amino acid sequence substantially identical thereto (e.g., 95% to 99.9% identical thereto, or having at least one amino acid alteration, but not more than five, ten or fifteen alterations (e.g., substitutions, deletions, or insertions, e.g., conservative substitutions) to the amino acid sequence of SEQ ID NO: 67

[0028] In one embodiment, the first TAM binding moiety is an antibody molecule that binds to CCR2 and comprises the heavy chain variable region sequence of: SEQ ID NO: 54, or an amino acid sequence substantially identical thereto (e.g., 95% to 99.9% identical thereto, or having at least one amino acid alteration, but not more than five, ten or fifteen alterations (e.g., substitutions, deletions, or insertions, e.g., conservative substitutions) to the amino acid sequence of SEQ ID NO: 54; and/or comprises the light chain variable region sequence of: SEQ ID NO: 57, or a an amino acid sequence substantially identical thereto (e.g., 95% to 99.9% identical thereto, or having at least one amino acid alteration, but not more than five, ten or fifteen alterations (e.g., substitutions, deletions, or insertions, e.g., conservative substitutions) to the amino acid sequence of SEQ ID NO: 57; and the second TAM binding moiety is an antibody molecule that binds to CSF1R and comprises the heavy chain variable region sequence of: SEQ ID NO: 69, or an amino acid sequence substantially identical thereto (e.g., 95% to 99.9% identical thereto, or having at least one amino acid alteration, but not more than five, ten or fifteen alterations (e.g., substitutions, deletions, or insertions, e.g., conservative substitutions) to the amino acid sequence of SEQ ID NO: 69; and/or comprises the light chain variable region sequence of: SEQ ID NO: 70, or an amino acid sequence substantially identical thereto (e.g., 95% to 99.9% identical thereto, or having at least one amino acid alteration, but not more than five, ten or fifteen alterations (e.g., substitutions, deletions, or insertions, e.g., conservative substitutions) to the amino acid sequence of SEQ ID NO: 70

[0029] In one embodiment, the first TAM binding moiety is an antibody molecule that binds to CCR2 and comprises the heavy chain variable region sequence of: SEQ ID NO: 59, or an amino acid sequence substantially identical thereto (e.g., 95% to 99.9% identical thereto, or having at least one amino acid alteration, but not more than five, ten or fifteen alterations (e.g., substitutions, deletions, or insertions, e.g., conservative substitutions) to the amino acid sequence of SEQ ID NO: 59; and/or comprises the light chain variable region sequence of: SEQ ID NO: 60, or an amino acid sequence substantially identical thereto (e.g., 95% to 99.9% identical thereto, or having at least one amino acid alteration, but not more than five, ten or fifteen alterations (e.g., substitutions, deletions, or insertions, e.g., conservative substitutions) to the amino acid sequence of SEQ ID NO: 60; and the second TAM binding moiety is an antibody molecule that binds to CSF1R and comprises the heavy chain variable region sequence of: SEQ ID NO: 66, or an amino acid sequence substantially identical thereto (e.g., 95% to 99.9% identical thereto, or having at least one amino acid alteration, but not more than five, ten or fifteen alterations (e.g., substitutions, deletions, or insertions, e.g., conservative substitutions) to the amino acid sequence of SEQ ID NO: 66; and/or comprises the light chain variable region sequence of: SEQ ID NO: 67, or an amino acid sequence substantially identical thereto (e.g., 95% to 99.9% identical thereto, or having at least one amino acid alteration, but not more than five, ten or fifteen alterations (e.g., substitutions, deletions, or insertions, e.g., conservative substitutions) to the amino acid sequence of SEQ ID NO: 67.

[0030] In one embodiment, the first TAM binding moiety is an antibody molecule that binds to CCR2 and comprises the heavy chain variable region sequence of: SEQ ID NO: 59, or an amino acid sequence substantially identical thereto (e.g., 95% to 99.9% identical thereto, or having at least one amino acid alteration, but not more than five, ten or fifteen alterations (e.g., substitutions, deletions, or insertions, e.g., conservative substitutions) to the amino acid sequence of SEQ ID NO: 59; and/or comprises the light chain variable region sequence of: SEQ ID NO: 60, or an amino acid sequence substantially identical thereto (e.g., 95% to 99.9% identical thereto, or having at least one amino acid alteration, but not more than five, ten or fifteen alterations (e.g., substitutions, deletions, or insertions, e.g., conservative substitutions) to the amino acid sequence of SEQ ID NO: 60; and the second TAM binding moiety is an antibody molecule that binds to CSF1R and comprises the heavy chain variable region sequence of: SEQ ID NO: 69, or an amino acid sequence substantially identical thereto (e.g., 95% to 99.9% identical thereto, or having at least one amino acid alteration, but not more than five, ten or fifteen alterations (e.g., substitutions, deletions, or insertions, e.g., conservative substitutions) to the amino acid sequence of SEQ ID NO: 69; and/or comprises the light chain variable region sequence of: SEQ ID NO: 70, or an amino acid sequence substantially identical thereto (e.g., 95% to 99.9% identical thereto, or having at least one amino acid alteration, but not more than five, ten or fifteen alterations (e.g., substitutions, deletions, or insertions, e.g., conservative substitutions) to the amino acid sequence of SEQ ID NO: 70.

[0031] In one embodiment, the first TAM binding moiety is an antibody molecule that binds to CCR2 and comprises the heavy chain variable region sequence of: SEQ ID NO: 62, or an amino acid sequence substantially identical thereto (e.g., 95% to 99.9% identical thereto, or having at least one amino acid alteration, but not more than five, ten or fifteen alterations (e.g., substitutions, deletions, or insertions, e.g., conservative substitutions) to the amino acid sequence of SEQ ID NO: 62; and/or comprises the light chain variable region sequence of: SEQ ID NO: 63, or an amino acid sequence substantially identical thereto (e.g., 95% to 99.9% identical thereto, or having at least one amino acid alteration, but not more than five, ten or fifteen alterations (e.g., substitutions, deletions, or insertions, e.g., conservative substitutions) to the amino acid sequence of SEQ ID NO: 63; and the second TAM binding moiety is an antibody molecule that binds to CSF1R and comprises the heavy chain variable region sequence of: SEQ ID NO: 66, or an amino acid sequence substantially identical thereto (e.g., 95% to 99.9% identical thereto, or having at least one amino acid alteration, but not more than five, ten or fifteen alterations (e.g., substitutions, deletions, or insertions, e.g., conservative substitutions) to the amino acid sequence of SEQ ID NO: 66; and/or comprises the light chain variable region sequence of: SEQ ID NO: 67, or an amino acid sequence substantially identical thereto (e.g., 95% to 99.9% identical thereto, or having at least one amino acid alteration, but not more than five, ten or fifteen alterations (e.g., substitutions, deletions, or insertions, e.g., conservative substitutions) to the amino acid sequence of SEQ ID NO: 67

[0032] In one embodiment, the first TAM binding moiety is an antibody molecule that binds to CCR2 and comprises the heavy chain variable region sequence of: SEQ ID NO: 62, or an amino acid sequence substantially identical thereto (e.g., 95% to 99.9% identical thereto, or having at least one amino acid alteration, but not more than five, ten or fifteen alterations (e.g., substitutions, deletions, or insertions, e.g., conservative substitutions) to the amino acid sequence of SEQ ID NO: 62; and/or comprises the light chain variable region sequence of: SEQ ID NO: 63, or an amino acid sequence substantially identical thereto (e.g., 95% to 99.9% identical thereto, or having at least one amino acid alteration, but not more than five, ten or fifteen alterations (e.g., substitutions, deletions, or insertions, e.g., conservative substitutions) to the amino acid sequence of SEQ ID NO: 63; and the second TAM binding moiety is an antibody molecule that binds to CSF1R and comprises the heavy chain variable region sequence of: SEQ ID NO: 69, or an amino acid sequence substantially identical thereto (e.g., 95% to 99.9% identical thereto, or having at least one amino acid alteration, but not more than five, ten or fifteen alterations (e.g., substitutions, deletions, or insertions, e.g., conservative substitutions) to the amino acid sequence of SEQ ID NO: 69; and/or comprises the light chain variable region sequence of: SEQ ID NO: 70, an amino acid sequence substantially identical thereto (e.g., 95% to 99.9% identical thereto, or having at least one amino acid alteration, but not more than five, ten or fifteen alterations (e.g., substitutions, deletions, or insertions, e.g., conservative substitutions) to the amino acid sequence of SEQ ID NO: 70.

[0033] In one embodiment, the first TAM binding moiety is an antibody molecule that binds to CCR2 and comprises the heavy chain variable region sequence of: SEQ ID NO: 64, or an amino acid sequence substantially identical thereto (e.g., 95% to 99.9% identical thereto, or having at least one amino acid alteration, but not more than five, ten or fifteen alterations (e.g., substitutions, deletions, or insertions, e.g., conservative substitutions) to the amino acid sequence of SEQ ID NO: 64; and/or comprises the light chain variable region sequence of: SEQ ID NO: 65, or an amino acid sequence substantially identical thereto (e.g., 95% to 99.9% identical thereto, or having at least one amino acid alteration, but not more than five, ten or fifteen alterations (e.g., substitutions, deletions, or insertions, e.g., conservative substitutions) to the amino acid sequence of SEQ ID NO: 65; and the second TAM binding moiety is an antibody molecule that binds to CSF1R and comprises the heavy chain variable region sequence of: SEQ ID NO: 66, or an amino acid sequence substantially identical thereto (e.g., 95% to 99.9% identical thereto, or having at least one amino acid alteration, but not more than five, ten or fifteen alterations (e.g., substitutions, deletions, or insertions, e.g., conservative substitutions) to the amino acid sequence of SEQ ID NO: 66; and/or comprises the light chain variable region sequence of: SEQ ID NO: 67, or an amino acid sequence substantially identical thereto (e.g., 95% to 99.9% identical thereto, or having at least one amino acid alteration, but not more than five, ten or fifteen alterations (e.g., substitutions, deletions, or insertions, e.g., conservative substitutions) to the amino acid sequence of SEQ ID NO: 67.

[0034] In one embodiment, the first TAM binding moiety is an antibody molecule that binds to CCR2 and comprises the heavy chain variable region sequence of: SEQ ID NO: 64, or an amino acid sequence substantially identical thereto (e.g., 95% to 99.9% identical thereto, or having at least one amino acid alteration, but not more than five, ten or fifteen alterations (e.g., substitutions, deletions, or insertions, e.g., conservative substitutions) to the amino acid sequence of SEQ ID NO: 64; and/or comprises the light chain variable region sequence of: SEQ ID NO: 65, or an amino acid sequence substantially identical thereto (e.g., 95% to 99.9% identical thereto, or having at least one amino acid alteration, but not more than five, ten or fifteen alterations (e.g., substitutions, deletions, or insertions, e.g., conservative substitutions) to the amino acid sequence of SEQ ID NO: 65; and the second TAM binding moiety is an antibody molecule that binds to CSF1R and comprises the heavy chain variable region sequence of: SEQ ID NO: 69, or an amino acid sequence substantially identical thereto (e.g., 95% to 99.9% identical thereto, or having at least one amino acid alteration, but not more than five, ten or fifteen alterations (e.g., substitutions, deletions, or insertions, e.g., conservative substitutions) to the amino acid sequence of SEQ ID NO: 69; and/or comprises the light chain variable region sequence of: SEQ ID NO: 70, or an amino acid sequence substantially identical thereto (e.g., 95% to 99.9% identical thereto, or having at least one amino acid alteration, but not more than five, ten or fifteen alterations (e.g., substitutions, deletions, or insertions, e.g., conservative substitutions) to the amino acid sequence of SEQ ID NO: 70.

[0035] In some embodiments, the first or the second TAM binding moiety is an antibody molecule that binds to PD-L1 and comprises one, two, or three CDRs from the heavy chain variable region sequence of: SEQ ID NO: 109, SEQ ID NO: 111, or SEQ ID NO: 113, or a closely related CDR, e.g., CDRs which have at least one amino acid alteration, but not more than two, three or four alterations (e.g., substitutions, deletions, or insertions, e.g., conservative substitutions) from a CDR of SEQ ID NO: 109, SEQ ID NO: 111, or SEQ ID NO: 113; and/or comprises one, two, or three CDRs from the light chain variable region sequence of: SEQ ID NO: 110, SEQ ID NO: 112, or SEQ ID NO: 114, or a closely related CDR, e.g., CDRs which have at least one amino acid alteration, but not more than two, three or four alterations (e.g., substitutions, deletions, or insertions, e.g., conservative substitutions) from a CDR of SEQ ID NO: 110, SEQ ID NO: 112, or SEQ ID NO: 114 In some embodiments, the antibody molecule that binds to PD-L1 comprises the heavy chain variable region sequence of: SEQ ID NO: 109, SEQ ID NO: 111, or SEQ ID NO: 113, or an amino acid sequence substantially identical thereto (e.g., 95% to 99.9% identical thereto, or having at least one amino acid alteration, but not more than five, ten or fifteen alterations (e.g., substitutions, deletions, or insertions, e.g., conservative substitutions) to the amino acid sequence of SEQ ID NO: 109, SEQ ID NO: 111, or SEQ ID NO: 113); and/or comprises the light chain variable region sequence of: SEQ ID NO: 110, SEQ ID NO: 112, or SEQ ID NO: 114, or an amino acid sequence substantially identical thereto (e.g., 95% to 99.9% identical thereto, or having at least one amino acid alteration, but not more than five, ten or fifteen alterations (e.g., substitutions, deletions, or insertions, e.g., conservative substitutions) to the amino acid sequence of SEQ ID NO: 110, SEQ ID NO: 112, or SEQ ID NO: 114).

[0036] In some embodiments, (i) the first IMC binding moiety binds to a first antigen (e.g., CSF1R, CCR2, CXCR2, CD86, CD163, CX3CR1, MARCO, CD204, CD52, folate receptor beta, or PD-L1) monovalently, and/or (ii) the second IMC binding moiety binds to a second antigen (e.g., CCR2, CSF1R, CXCR2, CD86, CD163, CX3CR1, MARCO, CD204, CD52, folate receptor beta, or PD-L1) monovalently, wherein the first antigen is different from the second antigen.

[0037] In some embodiments, (i) the multispecific molecule binds to a first antigen (e.g., CSF1R, CCR2, CXCR2, CD86, CD163, CX3CR1, MARCO, CD204, CD52, folate receptor beta, or PD-L1) monovalently, and/or (ii) the multispecific molecule binds to a second antigen (e.g., CCR2, CSF1R, CXCR2, CD86, CD163, CX3CR1, MARCO, CD204, CD52, folate receptor beta, or PD-L1) monovalently, wherein the first antigen is different from the second antigen.

[0038] In some embodiments, (i) the multispecific molecule inhibits a first antigen in the presence of a second antigen, optionally wherein the multispecific molecule reduces an activity of the first antigen in a cell, e.g., by at least 40, 50, 60, 70, 80, or 90%, when the cell expresses both the first antigen and the second antigen on the cell surface, and/or (ii) the multispecific molecule does not inhibit or does not substantially inhibit the first antigen in the absence of the second antigen, optionally wherein the multispecific molecule does not reduce an activity of the first antigen, or does not reduce an activity of the first antigen by more than 2, 4, 6, 8, 10, or 15%, when the cell expresses the first antigen but not the second antigen on the cell surface.

[0039] In some embodiments, (i) the multispecific molecule inhibits a second antigen in the presence of a first antigen, optionally wherein the multispecific molecule reduces an activity of the second antigen in a cell, e.g., by at least 40, 50, 60, 70, 80, or 90%, when the cell expresses both the first antigen and the second antigen on the cell surface, and/or (ii) the multispecific molecule does not inhibit or does not substantially inhibit the second antigen in the absence of the first antigen, optionally wherein the multispecific molecule does not reduce an activity of the second antigen, or does not reduce an activity of the second antigen by more than 2, 4, 6, 8, 10, or 15%, when the cell expresses the second antigen but not the first antigen on the cell surface.

[0040] In some embodiments, the multispecific molecule further comprises one or more additional binding moieties (e.g., a third binding moiety, a fourth binding moiety, (e.g., a trispecific or a tetraspecific molecule). In some embodiments, the multispecific molecule further comprises one or more additional binding moieties (e.g., a third binding moiety, a fourth binding moiety, (e.g., a trispecific or a tetraspecific molecule). In some embodiments, the multispecific molecule comprises a third TAM binding moiety (e.g., an antibody molecule), wherein the third TAM binding moiety is different from the first and the second TAM binding moieties. In some embodiments, the first TAM binding moiety binds to human CSF1R, the second TAM binding moiety binds to human CCR2, and the third TAM binding moiety binds to CXCR2.

[0041] In some embodiments, the multispecific molecule comprises a third binding moiety (e.g., antibody molecule) that is a tumor targeting moiety. In some embodiments, the tumor targeting moiety binds to PD-L1, mesothelin, CD47, gangloside 2 (GD2), prostate stem cell antigen (PSCA), prostate specific membrane antigen (PMSA), prostate-specific antigen (PSA), carcinoembryonic antigen (CEA), Ron Kinase, c-Met, Immature laminin receptor, TAG-72, BING-4, Calcium-activated chloride channel 2, Cyclin-B1, 9D7, Ep-CAM, EphA3, Her2/neu, Telomerase, SAP-1, Survivin, NY-ESO-1/LAGE-1, PRAME, SSX-2, Melan-A/MART-1, Gp100/pmel17, Tyrosinase, TRP-1/-2, MC1R, β-catenin, BRCA1/2, CDK4, CML66, Fibronectin, p53, Ras, TGF-B receptor, AFP, ETA, MAGE, MUC-1, CA-125, BAGE, GAGE, NY-ESO-1, β-catenin, CDK4, CDCl27, CD47, α actinin-4, TRP1/gp75, TRP2, gp100, Melan-A/MART1, gangliosides, WT1, EphA3, Epidermal growth factor receptor (EGFR), CD20, MART-2, MART-1, MUC1, MUC2, MUM1, MUM2, MUM3, NA88-1, NPM, OA1, OGT, RCC, RUI1, RUI2, SAGE, TRG, TRP1, TSTA, Folate receptor alpha, L1-CAM, CAIX, EGFRvIII, gpA33, GD3, GM2, VEGFR, Intergrins (Integrin alphaVbeta3, Integrin alpha5Beta1), Carbohydrates (Le), IGF1R, EPHA3, TRAILR1, TRAILR2, or RANKL.

[0042] In some embodiments, the multispecific molecule is a bispecific molecule comprising a first and a second non-contiguous polypeptides, wherein: (i) the first polypeptide includes, e.g., in the N- to C-orientation, the first TAM binding moiety (e.g., an antibody molecule (e.g., a first portion of a first antigen domain, e.g., a first VH-CH1 of a Fab molecule)), that binds to, e.g., a first TAM antigen, e.g., CSF1R, CCR2, CXCR2, or PD-L1, connected, optionally via a linker to, a first domain that promotes association between the first and the second polypeptide (e.g., a first immunoglobulin constant domain (e.g., a first Fc molecule as described herein); (ii) the second polypeptide includes, e.g., in the N- to C-orientation, the second TAM binding moiety (e.g., an antibody molecule, e.g., a scFv that binds to, e.g., a second TAM antigen, e.g., CCR2, CSF1R, CXCR2, or PD-L1)), connected, optionally, via a linker to, a second domain that promotes association between the first and the second polypeptide (e.g., a second immunoglobulin constant domain (e.g., a second Fc molecule as described herein); and (iii) the third polypeptide includes, e.g., in the N- to C-orientation, a second portion of the first antigen domain, e.g., a first VL-CL of the Fab, that binds to the first TAM antigen, e.g., wherein the third polypeptide associates non-covalently to the first polypeptide; and (iv) the fourth polypeptide includes, e.g., in the N- to C-orientation, a second portion of the second antigen domain, e.g., a second VL-CL of the Fab, that binds to the second TAM antigen, e.g., wherein the fourth polypeptide associates non-covalently to the second polypeptide. In some embodiments, the first and the second polypeptides are homo- or heterodimers.

[0043] In some embodiments, the multispecific molecule is a bispecific molecule, wherein:

[0044] (i) the first TAM binding moiety (e.g., a binding moiety that binds to a first TAM antigen, e.g., CSF1R, CCR2, or CXCR2) comprises a first and a second non-contiguous polypeptides, and

[0045] (ii) the second TAM binding moiety (e.g., a binding moiety that binds to a second TAM antigen, e.g., CSF1R, CCR2, or CXCR2) comprises a third and a fourth non-contiguous polypeptides, wherein:

[0046] (a) the first polypeptide comprises, e.g., in the N- to C-orientation, a first VH, a first CH1, connected, optionally via a linker, to a first domain (e.g., a first Fc region) that promotes association between the first and the third polypeptides,

[0047] (b) the second polypeptide comprises, e.g., in the N- to C-orientation, a first VL and a first CL,

[0048] (c) the third polypeptide comprises, e.g., in the N- to C-orientation, a second VH, a second CH1, connected, optionally via a linker, to a second domain (e.g., a second Fc region) that promotes association between the first and the third polypeptides, and

[0049] (d) the fourth polypeptide comprises, e.g., in the N- to C-orientation, a second VL and a second CL. In some embodiments, the first and the second domains (e.g., the first and the second Fc regions) form a homo- or heterodimer.

[0050] In one aspect, the invention provides an isolated multispecific, e.g., a bispecific, molecule, comprising (i) an anti-CSF1R binding moiety (e.g., an anti-CSF1R antibody molecule); and (ii) an anti-CCR2 binding moiety (e.g., an anti-CCR2 antibody molecule). Without wishing to be bound by theory, the anti-CSF1R/anti-CCR2 multispecific molecule may preferentially bind to a CSF1R-positive, CCR2-positive cell relative to a CSF1R-positive, CCR2-negative cell, or a CSF1R-negative, CCR2-positive cell. Exemplary CSF1R-positive, CCR2-positive cell include, but are not limited to, tumor-associated macrophages (TAMs) and myeloid derived suppressor cells (MDSCs). Exemplary CSF1R-positive, CCR2-negative cells include, but are not limited to, tissue-resident macrophages (e.g., Kupffer cells), and Langerhans cells. Exemplary CSF1R-negative, CCR2-positive cells include, but are not limited to, T cells (e.g., activated T cells, e.g., activated CD4+ and/or CD8+ T cells), NK cells, and neutrophils. Without wishing to be bound by theory, the anti-CSF1R/anti-CCR2 multispecific molecule may preferentially bind to CSF1R-positive, CCR2-positive cells (e.g., pro-tumorigenic TAMs or MDSCs) relative to CSF1R-positive, CCR2-negative cells (e.g., tissue-resident macrophages (e.g., Kupffer cells), or Langerhans cells), or CSF1R-negative, CCR2-positive cells (e.g., activated T cells or NK cells).

[0051] Without wishing to be bound by theory, pro-tumorigenic tumor associated macrophages (TAMs) and myeloid-derived suppressor cells (MDSC) express both CSF1R and CCR2. In contrast, Kupffer cells and other tissue macrophages express CSF1R but not CCR2. In one embodiment, the anti-CSF1R/anti-CCR2 multispecific antibody molecule disclosed herein selectively binds to intratumoral M-MDSCs and M2 macrophages. In one embodiment, the anti-CSF1R/anti-CCR2 multispecific antibody molecule disclosed herein reduces immunosuppressive myeloid cells and/or increases infiltration of cytotoxic T cells in the tumor. In one embodiment, the anti-CSF1R/anti-CCR2 multispecific antibody molecule disclosed herein depletes TAMs but spares healthy liver Kupffer cells. In one embodiment, the anti-CSF1R/anti-CCR2 multispecific antibody molecule disclosed herein is localized selectively to the tumor to reduce systemic immunotoxicity.

[0052] In some embodiments, the anti-CSF1R/anti-CCR2 multispecific molecule, when it binds to a target cell, may induce antibody-dependent cellular cytotoxicity (ADCC) or complement-dependent cytotoxicity (CDC) of the target cell. In some embodiments, the anti-CSF1R/anti-CCR2 multispecific molecule may preferentially bind to and reduce the number of immunosuppressive myeloid cells in the tumor microenvironment (e.g., TAMs or MDSCs), while sparing homeostatic myeloid cells (e.g., tissue-resident macrophages (e.g., Kupffer cells)) and other anti-tumor immune cells (e.g., activated T cells and NK cells). Depletion of homeostatic myeloid cells may be partially responsible for adverse events in patients receiving anti-CSF1R antibody therapies.

[0053] In some embodiments, the multispecific molecule has one or more (e.g., 1, 2, 3, 4, 5, 6, 7, 8, 9, 10, 11, 12, 13, or more) of the following properties:

[0054] (i) the multispecific molecule preferentially binds to a CSF1R-positive, CCR2-positive cell relative to a CSF1R-positive, CCR2-negative cell, or a CSF1R-negative, CCR2-positive cell, e.g., the binding of the multispecific molecule to the CSF1R-positive, CCR2-positive cell is at least 2, 4, 6, 8, 10, 15, 20, or 25-fold stronger than the binding of the multispecific molecule to the CSF1R-positive, CCR2-negative cell, or the CSF1R-negative, CCR2-positive cell, e.g., as measured using a flow cytometry analysis, e.g., as measured using methods described in Example 2 with respect to FIG. 1;

[0055] (ii) the multispecific molecule preferentially binds to a CSF1R-positive, CCR2-positive cell relative to a CSF1R-positive, CCR2-negative cell, e.g., the EC50 of the multispecific molecule for binding to a CSF1R-positive, CCR2-positive cell is no more than 60, 50, 40, 30, 20, or 10% of the EC50 of the multispecific molecule for binding to a CSF1R-positive, CCR2-negative cell, e.g., as measured using a flow cytometry analysis, e.g., as measured using methods described in Example 2 with respect to FIG. 1;

[0056] (iii) the multispecific molecule preferentially binds to a CSF1R-positive, CCR2-positive cell relative to a CSF1R-negative, CCR2-positive cell, e.g., the EC50 of the multispecific molecule for binding to a CSF1R-positive, CCR2-positive cell is no more than 50, 40, 30, 20, 10, or 5% of the EC50 of the multispecific molecule for binding to a CSF1R-negative, CCR2-positive cell, e.g., as measured using a flow cytometry analysis, e.g., as measured using methods described in Example 2 with respect to FIG. 1;

[0057] (iv) the multispecific molecule preferentially binds to tumor-associated macrophages (TAMs) or myeloid derived suppressor cells (MDSCs) relative to T cells, NK cells, neutrophils, tissue-resident macrophages (e.g., Kupffer cells), or Langerhans cells, e.g., the binding of the multispecific molecule to TAMs or MDSCs is at least 2, 4, 6, 8, 10, 15, 20, or 25-fold stronger than the binding of the multispecific molecule to T cells, NK cells, neutrophils, tissue-resident macrophages (e.g., Kupffer cells), or Langerhans cells, e.g., as measured using a flow cytometry analysis, e.g., as measured using methods described in Example 6 with respect to FIG. 5;

[0058] (v) the multispecific molecule inhibits monocyte migration, e.g., monocyte chemoattractant protein 1 (MCP1)-induced monocyte migration, e.g., reduces MCP1-induced monocyte migration by at least 40, 50, 60, or 70%, e.g., as measured using a transwell plate migration assay, e.g., as measured using methods described in Example 3 with respect to FIG. 2;

[0059] (vi) the multispecific molecule inhibits the proliferation of macrophages, e.g., bone marrow-derived macrophages, e.g., CSF-1-induced proliferation of bone marrow-derived macrophages, e.g., reduces CSF-1-induced proliferation of bone marrow-derived macrophages by at least 50, 60, 70, or 80%, e.g., as measured using a cell proliferation MTT assay, e.g., as measured using methods described in Example 4 with respect to FIG. 3B;

[0060] (vii) the multispecific molecule does not inhibit or does not substantially inhibit the differentiation of monocytes, e.g., bone marrow-derived monocytes, e.g., CSF-1-induced differentiation of bone marrow-derived monocytes, e.g., does not reduce CSF-1-induced differentiation of bone marrow-derived monocytes by more than 2, 4, 6, 8, or 10%, e.g., as measured using a flow cytometry analysis, e.g., as measured using methods described in Example 5 with respect to FIG. 4;

[0061] (viii) the multispecific molecule depletes suppressive myeloid cells, e.g., TAMs or MDSCs, e.g., reduces the number of suppressive myeloid cells, e.g., TAMs or MDSCs, by at least 80, 85, 90, 95, 99, or 99.5%, in vivo, e.g., as measured using a flow cytometry analysis, e.g., as measured using methods described in Example 7 with respect to FIG. 6;

[0062] (ix) the multispecific molecule does not deplete or does not substantially deplete tissue-resident macrophages, e.g., Kupffer cells, e.g., does not reduce the number of tissue-resident macrophages, e.g., Kupffer cells, by more than 4, 6, 8, 10, or 15%, in vivo, e.g., as measured using an immunohistochemistry analysis, e.g., as measured using methods described in Example 8 with respect to FIGS. 7B and 7D;

[0063] (x) the multispecific molecule increases CD86 or MHC class II expression on TAMs, e.g., as measured using a flow cytometry analysis or an immunohistochemistry analysis, e.g., as measured using methods described with respect to FIG. 21;

[0064] (xi) the multispecific molecule does not inhibit or does not substantially inhibit CSF-1 dependent cell survival of CSF1R-positive, CCR2-negative cells, e.g., does not reduce CSF-1 dependent cell survival of CSF1R-positive, CCR2-negative cells by more than 5, 10, or 15%, e.g., as measured using a cell viability MTT assay, e.g., as measured using methods described in Example 9 with respect to FIG. 8A;

[0065] (xii) the multispecific molecule increases CD8+ T cell tumor infiltration in vivo, e.g., increases % CD8+ T cells in CD3+ T cells in tumor by at least 1.5, 2, or 2.5-fold, e.g., as measured using a flow cytometry analysis, e.g., as measured using methods described in Example 10 with respect to FIG. 9;

[0066] (xiii) the multispecific molecule reduces Treg frequency in tumor in vivo, e.g., reduces Treg frequency in tumor by at least 15, 20, 25, or 30%, e.g., as measured using a flow cytometry analysis, e.g., as measured using methods described in Example 11 with respect to FIG. 10A;

[0067] (xiv) the multispecific molecule increases the CD8+ T cell/Treg ratio in tumor in vivo, e.g., increases the CD8+ T cell/Treg ratio in tumor by at least 2.5, 3, 3.5, 4, or 4.5-fold, e.g., as measured using a flow cytometry analysis, e.g., as measured using methods described in Example 11 with respect to FIG. 10B; or

[0068] (xv) the multispecific molecule reduces tumor growth, increases survival of a tumor-bearing animal, and/or enhances anti-tumor immune memory, e.g., as measured using methods described in Example 12 with respect to FIGS. 11A and 111B, or Example 19 with respect to FIG. 23.

[0069] In some embodiments, the multispecific molecule preferentially binds to a CSF1R-positive, CCR2-positive cell relative to a CSF1R-positive, CCR2-negative cell, or a CSF1R-negative, CCR2-positive cell, e.g., the binding of the multispecific molecule to the CSF1R-positive, CCR2-positive cell is at least 2, 4, 6, 8, 10, 15, 20, or 25-fold stronger than the binding of the multispecific molecule to the CSF1R-positive, CCR2-negative cell, or the CSF1R-negative, CCR2-positive cell, e.g., as measured using a flow cytometry analysis, e.g., as measured using methods described in Example 2 with respect to FIG. 1.

[0070] In some embodiments, the multispecific molecule preferentially binds to a CSF1R-positive, CCR2-positive cell relative to a CSF1R-positive, CCR2-negative cell, e.g., the EC50 of the multispecific molecule for binding to a CSF1R-positive, CCR2-positive cell is no more than 60, 50, 40, 30, 20, or 10% of the EC50 of the multispecific molecule for binding to a CSF1R-positive, CCR2-negative cell, e.g., as measured using a flow cytometry analysis, e.g., as measured using methods described in Example 2 with respect to FIG. 1.

[0071] In some embodiments, the multispecific molecule preferentially binds to a CSF1R-positive, CCR2-positive cell relative to a CSF1R-negative, CCR2-positive cell, e.g., the EC50 of the multispecific molecule for binding to a CSF1R-positive, CCR2-positive cell is no more than 50, 40, 30, 20, 10, or 5% of the EC50 of the multispecific molecule for binding to a CSF1R-negative, CCR2-positive cell, e.g., as measured using a flow cytometry analysis, e.g., as measured using methods described in Example 2 with respect to FIG. 1.

[0072] In some embodiments, the multispecific molecule preferentially binds to tumor-associated macrophages (TAMs) or myeloid derived suppressor cells (MDSCs) relative to T cells, NK cells, neutrophils, tissue-resident macrophages (e.g., Kupffer cells), or Langerhans cells, e.g., the binding of the multispecific molecule to TAMs or MDSCs is at least 2, 4, 6, 8, 10, 15, 20, or 25-fold stronger than the binding of the multispecific molecule to T cells, NK cells, neutrophils, tissue-resident macrophages (e.g., Kupffer cells), or Langerhans cells, e.g., as measured using a flow cytometry analysis, e.g., as measured using methods described in Example 6 with respect to FIG. 5.

[0073] In some embodiments, the multispecific molecule inhibits monocyte migration, e.g., monocyte chemoattractant protein 1 (MCP1)-induced monocyte migration, e.g., reduces MCP1-induced monocyte migration by at least 40, 50, 60, or 70%, e.g., as measured using a transwell plate migration assay, e.g., as measured using methods described in Example 3 with respect to FIG. 2.

[0074] In some embodiments, the multispecific molecule inhibits the proliferation of macrophages, e.g., bone marrow-derived macrophages, e.g., CSF-1-induced proliferation of bone marrow-derived macrophages, e.g., reduces CSF-1-induced proliferation of bone marrow-derived macrophages by at least 50, 60, 70, or 80%, e.g., as measured using a cell proliferation MTT assay, e.g., as measured using methods described in Example 4 with respect to FIG. 3B.

[0075] In some embodiments, the multispecific molecule does not inhibit or does not substantially inhibit the differentiation of monocytes, e.g., bone marrow-derived monocytes, e.g., CSF-1-induced differentiation of bone marrow-derived monocytes, e.g., does not reduce CSF-1-induced differentiation of bone marrow-derived monocytes by more than 2, 4, 6, 8, or 10%, e.g., as measured using a flow cytometry analysis, e.g., as measured using methods described in Example 5 with respect to FIG. 4.

[0076] In some embodiments, the multispecific molecule depletes suppressive myeloid cells, e.g., TAMs or MDSCs, e.g., reduces the number of suppressive myeloid cells, e.g., TAMs or MDSCs, by at least 80, 85, 90, 95, 99, or 99.5%, in vivo, e.g., as measured using a flow cytometry analysis, e.g., as measured using methods described in Example 7 with respect to FIG. 6.

[0077] In some embodiments, the multispecific molecule does not deplete or does not substantially deplete tissue-resident macrophages, e.g., Kupffer cells, e.g., does not reduce the number of tissue-resident macrophages, e.g., Kupffer cells, by more than 4, 6, 8, 10, or 15%, in vivo, e.g., as measured using an immunohistochemistry analysis, e.g., as measured using methods described in Example 8 with respect to FIGS. 7B and 7D.

[0078] In some embodiments, the multispecific molecule increases CD86 or MHC class II expression on TAMs, e.g., as measured using a flow cytometry analysis or an immunohistochemistry analysis, e.g., as measured using methods described with respect to FIG. 21.

[0079] In some embodiments, the multispecific molecule does not inhibit or does not substantially inhibit CSF-1 dependent cell survival of CSF1R-positive, CCR2-negative cells, e.g., does not reduce CSF-1 dependent cell survival of CSF1R-positive, CCR2-negative cells by more than 5, 10, or 15%, e.g., as measured using a cell viability MTT assay, e.g., as measured using methods described in Example 9 with respect to FIG. 8A.

[0080] In some embodiments, the multispecific molecule increases CD8+ T cell tumor infiltration in vivo, e.g., increases % CD8+ T cells in CD3+ T cells in tumor by at least 1.5, 2, or 2.5-fold, e.g., as measured using a flow cytometry analysis, e.g., as measured using methods described in Example 10 with respect to FIG. 9.

[0081] In some embodiments, the multispecific molecule reduces Treg frequency in tumor in vivo, e.g., reduces Treg frequency in tumor by at least 15, 20, 25, or 30%, e.g., as measured using a flow cytometry analysis, e.g., as measured using methods described in Example 11 with respect to FIG. 10A.

[0082] In some embodiments, the multispecific molecule increases the CD8+ T cell/Treg ratio in tumor in vivo, e.g., increases the CD8+ T cell/Treg ratio in tumor by at least 2.5, 3, 3.5, 4, or 4.5-fold, e.g., as measured using a flow cytometry analysis, e.g., as measured using methods described in Example 11 with respect to FIG. 10B.

[0083] In some embodiments, the multispecific molecule reduces tumor growth, increases survival of a tumor-bearing animal, and/or enhances anti-tumor immune memory, e.g., as measured using methods described in Example 12 with respect to FIGS. 11A and 111B, or Example 19 with respect to FIG. 23.

[0084] In some embodiments, the anti-CSF1R binding moiety and the anti-CCR2 binding moiety are, independently, a full antibody (e.g., an antibody that includes at least one, and preferably two, complete heavy chains, and at least one, and preferably two, complete light chains), or an antigen-binding fragment (e.g., a Fab, F(ab′)2, Fv, a scFv, a single domain antibody, or a diabody (dAb)). In some embodiments, the anti-CSF1R binding moiety and/or the anti-CCR2 binding moiety comprises a heavy chain constant region chosen from IgG1, IgG2, IgG3, or IgG4, or a fragment thereof. In some embodiments, the anti-CSF1R binding moiety and/or the anti-CCR2 binding moiety comprises a heavy chain constant region that can mediate antibody-dependent cellular cytotoxicity (ADCC) or complement-dependent cytotoxicity (CDC). In some embodiments, the anti-CSF1R binding moiety comprises a first heavy chain constant region (e.g., a first Fc region) and the anti-CCR2 binding moiety comprises a second heavy chain constant region (e.g., a second Fc region), wherein the first heavy chain constant region comprises one or more mutations that increase heterodimerization of the first heavy chain constant region and the second heavy chain constant region, relative to a naturally-existing heavy chain constant region, and/or wherein the second heavy chain constant region comprises one or more mutations that increase heterodimerization of the second heavy chain constant region and the first heavy chain constant region, relative to a naturally-existing heavy chain constant region. In some embodiments, the anti-CSF1R binding moiety and/or the anti-CCR2 binding moiety comprises a light chain constant region chosen from the light chain constant regions of kappa or lambda, or a fragment thereof. In some embodiments, the anti-CSF1R binding moiety comprises a kappa light chain constant region, or a fragment thereof, and the anti-CCR2 binding moiety comprises a lambda light chain constant region, or a fragment thereof. In some embodiments, the anti-CSF1R binding moiety comprises a lambda light chain constant region, or a fragment thereof, and the anti-CCR2 binding moiety comprises a kappa light chain constant region, or a fragment thereof. In some embodiments, the anti-CSF1R binding moiety and the anti-CCR2 binding moiety have a common light chain variable region. In some embodiments, the multispecific molecule further comprises a heavy chain constant region (e.g., an Fc region) chosen from the heavy chain constant regions of IgG1, IgG2, and IgG4, more particularly, the heavy chain constant region of human IgG1, IgG2 or IgG4. In some embodiments, the multispecific molecule further comprises a heavy chain constant region that can mediate antibody-dependent cellular cytotoxicity (ADCC) or complement-dependent cytotoxicity (CDC).

[0085] In some embodiments, the multispecific molecule comprises an anti-CSF1R antibody molecule and an anti-CCR2 antibody molecule, wherein:

[0086] (i) the anti-CSF1R antibody molecule comprises a first polypeptide and a second polypeptide, wherein the first polypeptide comprises a first light chain variable region (VL) and a first light chain constant region (CL), and the second polypeptide comprises a first heavy chain variable region (VH), a first heavy chain constant region 1 (CH1), and optionally, a first CH2 and a first CH3, and

[0087] (ii) the anti-CCR2 antibody molecule comprises a third polypeptide and a fourth polypeptide, wherein the third polypeptide comprises a second VL and a second CL, and the fourth polypeptide comprises a second VH, a second CH1, and optionally, a second CH2 and a second CH3.

[0088] In some embodiments, (i) the anti-CSF1R antibody molecule binds to CSF1R monovalently, and/or (ii) the anti-CCR2 antibody molecule binds to CCR2 monovalently. In some embodiments, the multispecific molecule binds to CSF1R monovalently, and/or binds to CCR2 monovalently. In some embodiments, the multispecific molecule binds to CSF1R monovalently, and binds to CCR2 monovalently.

[0089] In some embodiments,

[0090] (i) the multispecific molecule inhibits CSF1R in the presence of CCR2, optionally wherein the multispecific molecule reduces an activity of CSF1R (e.g., CSF1R signaling, e.g., CSF1-induced CSF1R signaling) in a cell, e.g., by at least 40, 50, 60, 70, 80, or 90%, when the cell expresses both CSF1R and CCR2 on the cell surface, and/or

[0091] (ii) the multispecific molecule does not inhibit or does not substantially inhibit CSF1R in the absence of CCR2, optionally wherein the multispecific molecule does not reduce an activity of CSF1R (e.g., CSF1R signaling, e.g., CSF1-induced CSF1R signaling), or does not reduce an activity of CSF1R by more than 2, 4, 6, 8, 10, or 15%, when the cell expresses CSF1R but not CCR2 on the cell surface.

[0092] In some embodiments,

[0093] (i) the multispecific molecule inhibits CCR2 in the presence of CSF1R, optionally wherein the multispecific molecule reduces an activity of CCR2 in a cell, e.g., by at least 40, 50, 60, 70, 80, or 90%, when the cell expresses both CCR2 and CSF1R on the cell surface, and/or

[0094] (ii) the multispecific molecule does not inhibit or does not substantially inhibit CCR2 in the absence of CSF1R, optionally wherein the multispecific molecule does not reduce an activity of CCR2, or does not reduce an activity of CCR2 by more than 2, 4, 6, 8, 10, or 15%, when the cell expresses CCR2 but not CSF1R on the cell surface.

[0095] In one aspect, this invention provides an isolated multispecific, e.g., a bispecific, molecule, comprising:

[0096] (i) a first binding moiety that binds to a molecule that mediates the trafficking of monocytes, e.g., inflammatory monocytes, e.g., Ly6C^{Hi} CCR2+CX3CR1^{Lo} inflammatory monocytes, optionally wherein the first binding moiety binds to CCR2; and

[0097] (ii) a second binding moiety that binds to a molecule that mediates the maturation and/or survival of monocytes and/or macrophages at an inflamed tissue, optionally wherein the second binding moiety binds to CSF1R.

[0098] In one aspect, this invention provides an isolated multispecific, e.g., a bispecific, molecule, comprising:

[0099] (i) a first binding moiety that reduces recruitment of inflammatory monocytes to tumor, optionally wherein the first binding moiety binds to and/or inhibits CCR2; and

[0100] (ii) a second binding moiety that reduces maturation and/or survival of monocytes and/or macrophages in the tumor microenvironment, optionally wherein the second binding moiety binds to and/or inhibits CSF1R.

[0101] In one aspect, this invention provides an isolated multispecific, e.g., a bispecific, molecule, comprising (i) an anti-CSF1R binding moiety (e.g., an anti-CSF1R antibody molecule); and (ii) an anti-PD-L1 binding moiety (e.g., an anti-PD-L1 antibody molecule).

[0102] In some embodiments of the aforementioned aspects and embodiments, the multispecific molecule further comprises one or more additional binding moieties (e.g., a third binding moiety, a fourth binding moiety, (e.g., a trispecific or a tetraspecific molecule), optionally wherein the third binding moiety is a third IMC binding moiety or a tumor targeting moiety. In some embodiments, the tumor targeting moiety is a tumor targeting moiety disclosed in WO2017165464, e.g., pages 108-118 of WO2017165464, herein incorporated by reference in its entirety.

[0103] In some embodiments of the aforementioned aspects and embodiments, the multispecific molecule further comprises an immune cell engager chosen from a T cell engager, an NK cell engager, a B cell engager, a dendritic cell engager, or a macrophage cell engager. In some embodiment, the immune cell engager is an immune cell engager disclosed in WO2017165464, e.g., pages 119-131 of WO2017165464, herein incorporated by reference in its entirety. In some embodiments, the immune cell engager binds to and activates an immune cell, e.g., an effector cell. In some embodiments, the immune cell engager binds to, but does not activate, an immune cell, e.g., an effector cell.

[0104] In some embodiments, the immune cell engager is a T cell engager, e.g., a T cell engager that mediates binding to and activation of a T cell, or a T cell engager that mediates binding to but not activation of a T cell. In some embodiments, the T cell engager binds to CD3, TCRα, TCRβ, TCRγ, TCRζ, ICOS, CD28, CD27, HVEM, LIGHT, CD40, 4-1BB, OX40, DR3, GITR, CD30, TIM1, SLAM, CD2, or CD226, e.g., the T cell engager is an anti-CD3 antibody molecule.

[0105] In some embodiments, the immune cell engager is an NK cell engager, e.g., an NK cell engager that mediates binding to and activation of an NK cell, or an NK cell engager that mediates binding to but not activation of an NK cell. In some embodiments, the NK cell engager is chosen from an antibody molecule, e.g., an antigen binding domain, or ligand that binds to (e.g., activates): NKp30, NKp40, NKp44, NKp46, NKG2D, DNAM1, DAP10, CD16 (e.g., CD16a, CD16b, or both), CRTAM, CD27, PSGL1, CD96, CD100 (SEMA4D), NKp80, CD244 (also known as SLAMF4 or 2B4), SLAMF6, SLAMF7, KIR2DS2, KIR2DS4, KIR3DS1, KIR2DS3, KIR2DS5, KIR2DS1, CD94, NKG2C, NKG2E, or CD160.

[0106] In some embodiments, the immune cell engager is a B cell engager, e.g., a CD40L, an OX40L, or a CD70 ligand, or an antibody molecule that binds to OX40, CD40 or CD70. In some embodiments, the immune cell engager is a macrophage cell engager, e.g., a CD2 agonist; a CD40L; an OX40L; an antibody molecule that binds to OX40, CD40 or CD70; an agonist of a Toll-like receptor (TLR) (e.g., a TLR4, e.g., a constitutively active TLR4 (caTLR4) or a TLR9 agonist); CD47; or a STING agonist.

[0107] In some embodiments, the immune cell engager is a dendritic cell engager, e.g., a CD2 agonist, an OX40 antibody, an OX40L, 41BB agonist, a Toll-like receptor agonist or a fragment thereof (e.g., a TLR4, e.g., a constitutively active TLR4 (caTLR4)), CD47 agonist, or a STING agonist.

[0108] In some embodiments of the aforementioned aspects and embodiments, the multispecific molecule further comprises a cytokine molecule. In some embodiments, the cytokine molecule is chosen from interleukin-2 (IL-2), interleukin-7 (IL-7), interleukin-12 (IL-12), interleukin-15 (IL-15), interleukin-18 (IL-18), interleukin-21 (IL-21), or interferon gamma, or a fragment or variant thereof, or a combination of any of the aforesaid cytokines. In some embodiments, the cytokine molecule is a cytokine molecule disclosed in WO2017165464, e.g., pages 108-118 of WO2017165464, herein incorporated by reference in its entirety.

[0109] In some embodiments of the aforementioned aspects and embodiments, the multispecific molecule further comprises a stromal modifying moiety. In some embodiments, the stromal modifying moiety causes one or more of: decreases the level or production of a stromal or extracellular matrix (ECM) component; decreases tumor fibrosis; increases interstitial tumor transport; improves tumor perfusion; expands the tumor microvasculature; decreases interstitial fluid pressure (IFP) in a tumor; or decreases or enhances penetration or diffusion of an agent, e.g., a cancer therapeutic or a cellular therapy, into a tumor or tumor vasculature. In some embodiments, the stromal modifying moiety is a stromal modifying moiety disclosed in WO2017165464, e.g., pages 131-136 of WO2017165464, herein incorporated by reference in its entirety.

[0110] In one aspect, provided herein is a multispecific, e.g., a bispecific, molecule, comprising:

[0111] (i) an anti-CSF1R binding moiety (e.g., an anti-CSF1R antibody molecule);

[0112] (ii) an anti-CCR2 binding moiety (e.g., an anti-CCR2 antibody molecule); and one, two,

[0113] or all of:

[0114] (iii) a TGF-beta inhibitor;

[0115] (iv) an anti-PDL1 binding moiety (e.g., an anti-PDL1 antibody molecule); and

[0116] (v) a cytokine molecule, e.g., an IL-2 molecule.

[0117] In one embodiment, the multispecific molecule preferentially binds to a CSF1R-positive, CCR2-positive cell relative to a CSF1R-positive, CCR2-negative cell, or a CSF1R-negative, CCR2-positive cell, e.g., the binding of the multispecific molecule to the CSF1R-positive, CCR2-positive cell is at least 2, 4, 6, 8, 10, 15, 20, or 25-fold stronger than the binding of the multispecific molecule to the CSF1R-positive, CCR2-negative cell, or the CSF1R-negative, CCR2-positive cell, e.g., as measured using a flow cytometry analysis, e.g., as measured using methods described in Example 2 with respect to FIG. 1. In one embodiment, the multispecific molecule preferentially binds to a CSF1R-positive, CCR2-positive cell relative to a CSF1R-positive, CCR2-negative cell, e.g., the EC50 of the multispecific molecule for binding to a CSF1R-positive, CCR2-positive cell is no more than 60, 50, 40, 30, 20, or 10% of the EC50 of the multispecific molecule for binding to a CSF1R-positive, CCR2-negative cell, e.g., as measured using a flow cytometry analysis, e.g., as measured using methods described in Example 2 with respect to FIG. 1. In one embodiment, the multispecific molecule preferentially binds to a CSF1R-positive, CCR2-positive cell relative to a CSF1R-negative, CCR2-positive cell, e.g., the EC50 of the multispecific molecule for binding to a CSF1R-positive, CCR2-positive cell is no more than 50, 40, 30, 20, 10, or 5% of the EC50 of the multispecific molecule for binding to a CSF1R-negative, CCR2-positive cell, e.g., as measured using a flow cytometry analysis, e.g., as measured using methods described in Example 2 with respect to FIG. 1. In one embodiment, the multispecific molecule preferentially binds to tumor-associated macrophages (TAMs) or myeloid derived suppressor cells (MDSCs) relative to T cells, NK cells, neutrophils, tissue-resident macrophages (e.g., Kupffer cells), or Langerhans cells, e.g., the binding of the multispecific molecule to TAMs or MDSCs is at least 2, 4, 6, 8, 10, 15, 20, or 25-fold stronger than the binding of the multispecific molecule to T cells, NK cells, neutrophils, tissue-resident macrophages (e.g., Kupffer cells), or Langerhans cells, e.g., as measured using a flow cytometry analysis, e.g., as measured using methods described in Example 6 with respect to FIG. 5. In one embodiment, the multispecific molecule inhibits monocyte migration, e.g., monocyte chemoattractant protein 1 (MCP1)-induced monocyte migration, e.g., reduces MCP1-induced monocyte migration by at least 40, 50, 60, or 70%, e.g., as measured using a transwell plate migration assay, e.g., as measured using methods described in Example 3 with respect to FIG. 2. In one embodiment, the multispecific molecule inhibits the proliferation of macrophages, e.g., bone marrow-derived macrophages, e.g., CSF-1-induced proliferation of bone marrow-derived macrophages, e.g., reduces CSF-1-induced proliferation of bone marrow-derived macrophages by at least 50, 60, 70, or 80%, e.g., as measured using a cell proliferation MTT assay, e.g., as measured using methods described in Example 4 with respect to FIG. 3B. In one embodiment, the multispecific molecule does not inhibit or does not substantially inhibit the differentiation of monocytes, e.g., bone marrow-derived monocytes, e.g., CSF-1-induced differentiation of bone marrow-derived monocytes, e.g., does not reduce CSF-1-induced differentiation of bone marrow-derived monocytes by more than 2, 4, 6, 8, or 10%, e.g., as measured using a flow cytometry analysis, e.g., as measured using methods described in Example 5 with respect to FIG. 4. In one embodiment, the multispecific molecule depletes suppressive myeloid cells, e.g., TAMs or MDSCs, e.g., reduces the number of suppressive myeloid cells, e.g., TAMs or MDSCs, by at least 80, 85, 90, 95, 99, or 99.5%, in vivo, e.g., as measured using a flow cytometry analysis, e.g., as measured using methods described in Example 7 with respect to FIG. 6. In one embodiment, the multispecific molecule does not deplete or does not substantially deplete tissue-resident macrophages, e.g., Kupffer cells, e.g., does not reduce the number of tissue-resident macrophages, e.g., Kupffer cells, by more than 4, 6, 8, 10, or 15%, in vivo, e.g., as measured using an immunohistochemistry analysis, e.g., as measured using methods described in Example 8 with respect to FIGS. 7B and 7D. In one embodiment, the multispecific molecule increases CD86 or MHC class II expression on TAMs, e.g., as measured using a flow cytometry analysis or an immunohistochemistry analysis, e.g., as measured using methods described with respect to FIG. 21. In one embodiment, the multispecific molecule does not inhibit or does not substantially inhibit CSF-1 dependent cell survival of CSF1R-positive, CCR2-negative cells, e.g., does not reduce CSF-1 dependent cell survival of CSF1R-positive, CCR2-negative cells by more than 5, 10, or 15%, e.g., as measured using a cell viability MTT assay, e.g., as measured using methods described in Example 9 with respect to FIG. 8A. In one embodiment, the multispecific molecule increases CD8+ T cell tumor infiltration in vivo, e.g., increases % CD8+ T cells in CD3+ T cells in tumor by at least 1.5, 2, or 2.5-fold, e.g., as measured using a flow cytometry analysis, e.g., as measured using methods described in Example 10 with respect to FIG. 9. In one embodiment, the multispecific molecule reduces Treg frequency in tumor in vivo, e.g., reduces Treg frequency in tumor by at least 15, 20, 25, or 30%, e.g., as measured using a flow cytometry analysis, e.g., as measured using methods described in Example 11 with respect to FIG. 10A. In one embodiment, the multispecific molecule increases the CD8+ T cell/Treg ratio in tumor in vivo, e.g., increases the CD8+ T cell/Treg ratio in tumor by at least 2.5, 3, 3.5, 4, or 4.5-fold, e.g., as measured using a flow cytometry analysis, e.g., as measured using methods described in Example 11 with respect to FIG. 10B. In one embodiment, the multispecific molecule reduces tumor growth, increases survival of a tumor-bearing animal, and/or enhances anti-tumor immune memory, e.g., as measured using methods described in Example 12 with respect to FIGS. 11A and 111B, or Example 19 with respect to FIG. 23.

[0118] In one embodiment, the anti-CSF1R binding moiety and the anti-CCR2 binding moiety are, independently, a full antibody (e.g., an antibody that includes at least one, and preferably two, complete heavy chains, and at least one, and preferably two, complete light chains), or an antigen-binding fragment (e.g., a Fab, F(ab′)2, Fv, a scFv, a single domain antibody, or a diabody (dAb)). In one embodiment, the anti-CSF1R binding moiety and/or the anti-CCR2 binding moiety comprises a heavy chain constant region chosen from IgG1, IgG2, IgG3, or IgG4, or a fragment thereof. In one embodiment, the anti-CSF1R binding moiety and/or the anti-CCR2 binding moiety comprises a heavy chain constant region that can mediate antibody-dependent cellular cytotoxicity (ADCC) or complement-dependent cytotoxicity (CDC). In one embodiment, the anti-CSF1R binding moiety comprises a first heavy chain constant region (e.g., a first Fc region) and the anti-CCR2 binding moiety comprises a second heavy chain constant region (e.g., a second Fc region), wherein the first heavy chain constant region comprises one or more mutations that increase heterodimerization of the first heavy chain constant region and the second heavy chain constant region, relative to a naturally-existing heavy chain constant region, and/or wherein the second heavy chain constant region comprises one or more mutations that increase heterodimerization of the second heavy chain constant region and the first heavy chain constant region, relative to a naturally-existing heavy chain constant region. In one embodiment, the anti-CSF1R binding moiety and/or the anti-CCR2 binding moiety comprises a light chain constant region chosen from the light chain constant regions of kappa or lambda, or a fragment thereof. In one embodiment, the anti-CSF1R binding moiety comprises a kappa light chain constant region, or a fragment thereof, and the anti-CCR2 binding moiety comprises a lambda light chain constant region, or a fragment thereof. In one embodiment, the anti-CSF1R binding moiety comprises a lambda light chain constant region, or a fragment thereof, and the anti-CCR2 binding moiety comprises a kappa light chain constant region, or a fragment thereof. In one embodiment, the anti-CSF1R binding moiety and the anti-CCR2 binding moiety have a common light chain variable region. In one embodiment, the multispecific molecule further comprises a heavy chain constant region (e.g., an Fc region) chosen from the heavy chain constant regions of IgG1, IgG2, and IgG4, more particularly, the heavy chain constant region of human IgG1, IgG2 or IgG4. In one embodiment, the multispecific molecule further comprises a heavy chain constant region that can mediate antibody-dependent cellular cytotoxicity (ADCC) or complement-dependent cytotoxicity (CDC). In one embodiment, the multispecific molecule comprises an anti-CSF1R antibody molecule and an anti-CCR2 antibody molecule, wherein: (i) the anti-CSF1R antibody molecule comprises a first polypeptide and a second polypeptide, wherein the first polypeptide comprises a first light chain variable region (VL) and a first light chain constant region (CL), and the second polypeptide comprises a first heavy chain variable region (VH), a first heavy chain constant region 1 (CH1), and optionally, a first CH2 and a first CH3, and (ii) the anti-CCR2 antibody molecule comprises a third polypeptide and a fourth polypeptide, wherein the third polypeptide comprises a second VL and a second CL, and the fourth polypeptide comprises a second VH, a second CH1, and optionally, a second CH2 and a second CH3.

[0119] In one embodiment, the anti-CSF1R antibody molecule binds to CSF1R monovalently. In one embodiment, the anti-CCR2 antibody molecule binds to CCR2 monovalently. In one embodiment, the multispecific molecule binds to CSF1R monovalently. In one embodiment, the multispecific molecule binds to CCR2 monovalently. In one embodiment, the multispecific molecule binds to CSF1R monovalently, and binds to CCR2 monovalently.

[0120] In one embodiment, the multispecific molecule inhibits CSF1R in the presence of CCR2, optionally wherein the multispecific molecule reduces an activity of CSF1R (e.g., CSF1R signaling, e.g., CSF1-induced CSF1R signaling) in a cell, e.g., by at least 40, 50, 60, 70, 80, or 90%, when the cell expresses both CSF1R and CCR2 on the cell surface. In one embodiment, the multispecific molecule does not inhibit or does not substantially inhibit CSF1R in the absence of CCR2, optionally wherein the multispecific molecule does not reduce an activity of CSF1R (e.g., CSF1R signaling, e.g., CSF1-induced CSF1R signaling), or does not reduce an activity of CSF1R by more than 2, 4, 6, 8, 10, or 15%, when the cell expresses CSF1R but not CCR2 on the cell surface. In one embodiment, the multispecific molecule inhibits CCR2 in the presence of CSF1R, optionally wherein the multispecific molecule reduces an activity of CCR2 in a cell, e.g., by at least 40, 50, 60, 70, 80, or 90%, when the cell expresses both CCR2 and CSF1R on the cell surface. In one embodiment, the multispecific molecule does not inhibit or does not substantially inhibit CCR2 in the absence of CSF1R, optionally wherein the multispecific molecule does not reduce an activity of CCR2, or does not reduce an activity of CCR2 by more than 2, 4, 6, 8, 10, or 15%, when the cell expresses CCR2 but not CSF1R on the cell surface.

[0121] In one embodiment, the multispecific molecule comprises (i) an anti-CSF1R binding moiety (e.g., an anti-CSF1R antibody molecule); (ii) an anti-CCR2 binding moiety (e.g., an anti-CCR2 antibody molecule); and (iii) a TGF beta inhibitor. In one embodiment, the TGF beta inhibitor inhibits TGF-beta 1, TGF-beta 3, or both TGF-beta 1 and TGF-beta 3, e.g., as measured using the methods described in Example 20 with respect to FIG. 26B. In one embodiment, the TGF beta inhibitor inhibits TGF-beta 1, TGF-beta 2, TGF-beta 3, both TGF-beta 1 and TGF-beta 3, or TGF-beta 1, TGF-beta 2, and TGF-beta 3, e.g., as measured using the methods described in Example 20 with respect to FIG. 26B. In one embodiment, the multispecific molecule reduces tumor growth and/or increases survival of a tumor-bearing animal, e.g., as measured using methods described in Example 20 with respect to FIGS. 27A-27C. In one embodiment, the TGF beta inhibitor comprises a TGF-beta receptor polypeptide (e.g., an extracellular domain of a TGF-beta receptor, or a functional variant thereof). In one embodiment, the TGF-beta inhibitor comprises one, two, or all of: a TGFBR1 polypeptide (e.g., 1, 2, 3, or more of a TGFBR1 polypeptide), a TGFBR2 polypeptide (e.g., 1, 2, 3, or more of a TGFBR2 polypeptide), or a TGFBR3 polypeptide (e.g., 1, 2, 3, or more of a TGFBR3 polypeptide). In one embodiment, the TGF-beta inhibitor comprises a TGFBR1 polypeptide. In one embodiment, the TGF-beta inhibitor comprises an extracellular domain of TGFBR1 or a sequence substantially identical thereto (e.g., a sequence that is at least 80%, 85%, 90%, or 95% identical thereto). In one embodiment, the TGF-beta inhibitor comprises an extracellular domain of SEQ ID NO: 95, 96, 97, 120, 121, or 122, or a sequence substantially identical thereto (e.g., a sequence that is at least 80%, 85%, 90%, or 95% identical thereto). In one embodiment, the TGF-beta inhibitor comprises the amino acid sequence of SEQ ID NO: 104 or 105, or a sequence substantially identical thereto (e.g., a sequence that is at least 80%, 85%, 90%, or 95% identical thereto). In one embodiment, the TGF beta inhibitor comprises a TGFBR2 polypeptide. In one embodiment, the TGF-beta inhibitor comprises an extracellular domain of TGFBR2 or a sequence substantially identical thereto (e.g., a sequence that is 80%, 85%, 90%, or 95% identical thereto). In one embodiment, the TGF-beta inhibitor comprises an extracellular domain of SEQ ID NO: 98, 99, 123, or 124, or a sequence substantially identical thereto (e.g., a sequence that is 80%, 85%, 90%, or 95% identical thereto). In one embodiment, the TGF-beta inhibitor comprises an amino acid sequence selected from the group consisting of SEQ ID NOs: 100, 101, 102, and 103, or a sequence substantially identical thereto (e.g., a sequence that is at least 80%, 85%, 90%, or 95% identical thereto). In one embodiment, the TGF-beta inhibitor comprises a TGFBR3 polypeptide. In one embodiment, the TGF-beta inhibitor comprises an extracellular domain of TGFBR3 or a sequence substantially identical thereto (e.g., a sequence that is at least 80%, 85%, 90%, or 95% identical thereto). In one embodiment, the TGF-beta inhibitor comprises an extracellular domain of SEQ ID NO: 106, 107, 125, or 126, or a sequence substantially identical thereto (e.g., a sequence that is at least 80%, 85%, 90%, or 95% identical thereto). In one embodiment, the TGF-beta inhibitor comprises the amino acid sequence of SEQ ID NO: 108, or a sequence substantially identical thereto (e.g., a sequence that is at least 80%, 85%, 90%, or 95% identical thereto). In one embodiment, the TGF-beta inhibitor comprises two TGF-beta receptor polypeptides that form a homodimer. In one embodiment, the TGF-beta inhibitor comprises two TGFBR1 polypeptides that form a homodimer. In one embodiment, the TGF-beta inhibitor comprises two TGFBR2 polypeptides that form a homodimer. In one embodiment, the TGF-beta inhibitor comprises two TGFBR3 polypeptides that form a homodimer. In one embodiment, the TGF-beta inhibitor comprises two TGF-beta receptor polypeptides that form a heterodimer. In one embodiment, the TGF-beta inhibitor comprises a TGFBR1 polypeptide and a TGFBR2 polypeptide that form a heterodimer. In one embodiment, the TGF-beta inhibitor comprises a TGFBR1 polypeptide and a TGFBR3 polypeptide that form a heterodimer. In one embodiment, the TGF-beta inhibitor comprises a TGFBR2 polypeptide and a TGFBR3 polypeptide that form a heterodimer.

[0122] In one embodiment, the TGF-beta inhibitor comprises a first TGF-beta receptor polypeptide and a second TGF-beta receptor polypeptide. In one embodiment, the multispecific molecule comprises a first Fc region (e.g., a first CH1-Fc region) and a second Fc region (e.g., a second CH1-Fc region), optionally wherein: (i) the first TGF-beta receptor polypeptide is linked, e.g., via a linker, to the first Fc region (e.g., a first CH1-Fc region), e.g., the C-terminus of the first Fc region (e.g., a first CH1-Fc region), and (ii) the second TGF-beta receptor polypeptide is linked, e.g., via a linker, to the second Fc region (e.g., a second CH1-Fc region), e.g., the C-terminus of the second Fc region (e.g., a second CH1-Fc region). In one embodiment, the first TGF-beta receptor polypeptide and the second TGF-beta receptor polypeptide form a homodimer or heterodimer, e.g., a homodimer. In one embodiment, the first or second TGF-beta receptor polypeptide comprises an extracellular domain of TGFBR1, TGFBR2, or TGFBR3, e.g., an extracellular domain of TGFBR2. In one embodiment, the multispecific molecule has the configuration of FIG. 35A or 35B. In one embodiment, the multispecific molecule comprises the amino acid sequence of SEQ ID NO: 192 (or a sequence substantially identical thereto, e.g., a sequence that is at least 80%, 85%, 90%, or 95% identical thereto) and the amino acid sequence of SEQ ID NO: 193 (or a sequence substantially identical thereto, e.g., a sequence that is at least 80%, 85%, 90%, or 95% identical thereto). In one embodiment, the multispecific molecule comprises the amino acid sequence of SEQ ID NO: 192 (or a sequence substantially identical thereto, e.g., a sequence that is at least 80%, 85%, 90%, or 95% identical thereto) and the amino acid sequence of SEQ ID NO: 195 (or a sequence substantially identical thereto, e.g., a sequence that is at least 80%, 85%, 90%, or 95% identical thereto). In one embodiment, the multispecific molecule comprises the amino acid sequence of SEQ ID NO: 194 (or a sequence substantially identical thereto, e.g., a sequence that is at least 80%, 85%, 90%, or 95% identical thereto) and the amino acid sequence of SEQ ID NO: 193 (or a sequence substantially identical thereto, e.g., a sequence that is at least 80%, 85%, 90%, or 95% identical thereto). In one embodiment, the multispecific molecule comprises the amino acid sequence of SEQ ID NO: 194 (or a sequence substantially identical thereto, e.g., a sequence that is at least 80%, 85%, 90%, or 95% identical thereto) and the amino acid sequence of SEQ ID NO: 195 (or a sequence substantially identical thereto, e.g., a sequence that is at least 80%, 85%, 90%, or 95% identical thereto).

[0123] In one embodiment, the TGF-beta inhibitor comprises a first TGF-beta receptor polypeptide and a second TGF-beta receptor polypeptide. In one embodiment, the multispecific molecule comprises a heavy chain constant region 1 (CH1) and a light chain constant region (CL), optionally wherein: (i) the first TGF-beta receptor polypeptide is linked, e.g., via a linker, to the CH1, e.g., the N-terminus of the CH1, and (ii) the second TGF-beta receptor polypeptide is linked, e.g., via a linker, to the CL, e.g., the N-terminus of the CL. In one embodiment, the first TGF-beta receptor polypeptide and the second TGF-beta receptor polypeptide form a homodimer or heterodimer, e.g., a homodimer. In one embodiment, the first or second TGF-beta receptor polypeptide comprises an extracellular domain of TGFBR1, TGFBR2, or TGFBR3, e.g., an extracellular domain of TGFBR2. In one embodiment, the multispecific molecule has the configuration of FIG. 35C or 35D. In one embodiment, the multispecific molecule comprises the amino acid sequence of SEQ ID NO: 196 (or a sequence substantially identical thereto, e.g., a sequence that is at least 80%, 85%, 90%, or 95% identical thereto) and the amino acid sequence of SEQ ID NO: 198 (or a sequence substantially identical thereto, e.g., a sequence that is at least 80%, 85%, 90%, or 95% identical thereto). In one embodiment, the multispecific molecule comprises the amino acid sequence of SEQ ID NO: 196 (or a sequence substantially identical thereto, e.g., a sequence that is at least 80%, 85%, 90%, or 95% identical thereto) and the amino acid sequence of SEQ ID NO: 199 (or a sequence substantially identical thereto, e.g., a sequence that is at least 80%, 85%, 90%, or 95% identical thereto). In one embodiment, the multispecific molecule comprises the amino acid sequence of SEQ ID NO: 197 (or a sequence substantially identical thereto, e.g., a sequence that is at least 80%, 85%, 90%, or 95% identical thereto) and the amino acid sequence of SEQ ID NO: 198 (or a sequence substantially identical thereto, e.g., a sequence that is at least 80%, 85%, 90%, or 95% identical thereto). In one embodiment, the multispecific molecule comprises the amino acid sequence of SEQ ID NO: 197 (or a sequence substantially identical thereto, e.g., a sequence that is at least 80%, 85%, 90%, or 95% identical thereto) and the amino acid sequence of SEQ ID NO: 199 (or a sequence substantially identical thereto, e.g., a sequence that is at least 80%, 85%, 90%, or 95% identical thereto).

[0124] In one embodiment, the TGF inhibitor is linked, e.g., via a linker, to the anti-CSF1R binding moiety (e.g., an anti-CSF1R antibody molecule). In one embodiment, the TGF inhibitor is linked, e.g., via a linker, to the anti-CCR2 binding moiety (e.g., an anti-CCR2 antibody molecule). In one embodiment, the anti-CSF1R binding moiety and/or the anti-CCR2 binding moiety comprises an Fc region, wherein the TGF inhibitor is linked, e.g., via a linker, to the Fc region, e.g., the C-terminus of the Fc region. In one embodiment, the multispecific molecule comprises a first TGF-beta inhibitor and a second TGF-beta inhibitor, wherein the first TGF-beta inhibitor is linked, e.g., via a linker, to the anti-CSF1R binding moiety (e.g., an anti-CSF1R antibody molecule) and the second TGF-beta inhibitor is linked, e.g., via a linker, to the anti-CCR2 binding moiety (e.g., an anti-CCR2 antibody molecule). In one embodiment, the anti-CSF1R binding moiety comprises a first Fc region, the anti-CCR2 binding moiety comprises a second Fc region, and the multispecific molecule comprises a first TGF-beta inhibitor and a second TGF-beta inhibitor, wherein the first TGF-beta inhibitor is linked, e.g., via a linker, to the first Fc region, e.g., the C-terminus of the first Fc region, and the second TGF-beta inhibitor is linked, e.g., via a linker, to the second Fc region, e.g., the C-terminus of the second Fc region.

[0125] In one embodiment, the anti-CSF1R binding moiety comprises a first light chain and a first heavy chain, wherein the first heavy chain comprises a first Fc region, wherein the C-terminus of the first Fc region is linked to an extracellular domain of TGFBR2 or a sequence substantially identical thereto (e.g., a sequence that is at least 80%, 85%, 90%, or 95% identical thereto). In one embodiment, the anti-CCR2 binding moiety comprises a second light chain and a second heavy chain, wherein the second heavy chain comprises a second Fc region, wherein the C-terminus of the second Fc region is linked to an extracellular domain of TGFBR2 or a sequence substantially identical thereto (e.g., a sequence that is at least 80%, 85%, 90%, or 95% identical thereto). In one embodiment, the multispecific molecule has the configuration shown in FIG. 12B.

[0126] In one embodiment, the TGF inhibitor is linked, e.g., via a linker, to the anti-CSF1R binding moiety (e.g., an anti-CSF1R antibody molecule). In one embodiment, the TGF inhibitor is linked, e.g., via a linker, to the anti-CCR2 binding moiety (e.g., an anti-CCR2 antibody molecule). In one embodiment, the anti-CSF1R binding moiety and/or the anti-CCR2 binding moiety comprises an Fc region, wherein the TGF inhibitor is linked, e.g., via a linker, to the Fc region, e.g., the N-terminus of the Fc region.

[0127] In one embodiment, the multispecific molecule comprises (i) an anti-CSF1R binding moiety (e.g., an anti-CSF1R antibody molecule); (ii) an anti-CCR2 binding moiety (e.g., an anti-CCR2 antibody molecule); and (iii) an anti-PDL1 binding moiety (e.g., an anti-PDL1 antibody molecule). In one embodiment, the anti-PDL1 binding moiety inhibits PDL1. In one embodiment, the anti-PDL1 binding moiety comprises a heavy chain variable domain (VH) comprising a HCDR1, a HCDR2, and a HCDR3 of any VH sequence of Table 10, or a sequence having at least one amino acid alteration, but not more than two, three or four alterations (e.g., substitutions, deletions, or insertions, e.g., conservative substitutions). In one embodiment, the anti-PDL1 binding moiety comprises a VH comprising any VH sequence of Table 10, or a sequence substantially identical thereto, e.g., 95% to 99.9% identical thereto, or having at least one amino acid alteration, but not more than five, ten or fifteen alterations (e.g., substitutions, deletions, or insertions, e.g., conservative substitutions). In one embodiment, the anti-PDL1 binding moiety comprises a light chain variable domain (VL) comprising a LCDR1, a LCDR2, and a LCDR3 of any VL sequence of Table 10, or a sequence having at least one amino acid alteration, but not more than two, three or four alterations (e.g., substitutions, deletions, or insertions, e.g., conservative substitutions). In one embodiment, the anti-PDL1 binding moiety comprises a VL comprising any VL sequence of Table 10, or a sequence substantially identical thereto, e.g., 95% to 99.9% identical thereto, or having at least one amino acid alteration, but not more than five, ten or fifteen alterations (e.g., substitutions, deletions, or insertions, e.g., conservative substitutions).

[0128] In one embodiment, the anti-PDL1 binding moiety is linked, e.g., via a linker, to the anti-CSF1R binding moiety (e.g., an anti-CSF1R antibody molecule) or the anti-CCR2 binding moiety (e.g., an anti-CCR2 antibody molecule). In one embodiment, the anti-CSF1R binding moiety and/or the anti-CCR2 binding moiety comprises an Fc region, wherein the anti-PDL1 binding moiety is linked, e.g., via a linker, to the Fc region, e.g., the C-terminus of the Fc region. In one embodiment, the PDL1 binding moiety is an scFv. In one embodiment, the multispecific molecule has the configuration shown in FIG. 12C or 12D.

[0129] In one embodiment, the multispecific molecule comprises (i) an anti-CSF1R binding moiety (e.g., an anti-CSF1R antibody molecule); (ii) an anti-CCR2 binding moiety (e.g., an anti-CCR2 antibody molecule); and (iii) an IL-2 molecule. In one embodiment, the IL-2 molecule is an IL-2 molecule disclosed herein, e.g., an IL-2 molecule comprising the amino acid sequence of SEQ ID NO: 237 or 238, or a sequence substantially identical thereto (e.g., a sequence that is 80%, 85%, 90%, or 95% identical thereto).

[0130] In one embodiment, the IL-2 molecule is linked, e.g., via a linker, to the anti-CSF1R binding moiety (e.g., an anti-CSF1R antibody molecule) or the anti-CCR2 binding moiety (e.g., an anti-CCR2 antibody molecule). In one embodiment, the anti-CSF1R binding moiety and/or the anti-CCR2 binding moiety comprises a light chain constant region, wherein the IL-2 molecule is linked, e.g., via a linker, to the light chain constant region, e.g., the C-terminus of the light chain constant region. In one embodiment, the multispecific molecule comprises a first IL-2 molecule and a second IL-2 molecule, wherein the first IL-2 molecule is linked, e.g., via a linker, to the anti-CSF1R binding moiety (e.g., an anti-CSF1R antibody molecule) and the second IL-2 molecule is linked, e.g., via a linker, to the anti-CCR2 binding moiety (e.g., an anti-CCR2 antibody molecule). In one embodiment, the anti-CSF1R binding moiety comprises a first light chain constant region, the anti-CCR2 binding moiety comprises a second light chain constant region, and the multispecific molecule comprises a first IL-2 molecule and a second IL-2 molecule, wherein the first IL-2 molecule is linked, e.g., via a linker, to the first light chain constant region, e.g., the C-terminus of the first light chain constant region, and the second IL-2 molecule is linked, e.g., via a linker, to the second light chain constant region, e.g., the C-terminus of the second light chain constant region. In one embodiment, the multispecific molecule has the configuration shown in FIG. 12E, 12F, or 12G.

[0131] In one aspect, provided herein is an antibody molecule (e.g., an isolated antibody molecule) that binds to CSF1R (e.g., human CSF1R), comprising a heavy chain variable region (VH) comprising a heavy chain complementarity determining region 1 (HCDR1), a HCDR2, and a HCDR3, wherein the HCDR1, HCDR2, and HCDR3 comprise the amino acid sequences of SEQ ID NOs: 402, 474, and 475, respectively, or an amino acid sequence comprising no more than 1, 2, 3, 4, 5, or 6 modifications. In some embodiments, the antibody molecule further comprises a light chain variable region (VL) comprising a light chain complementarity determining region 1 (LCDR1), a LCDR2, and a LCDR3. In some embodiments, the LCDR1, LCDR2, and LCDR3 comprise the amino acid sequences of SEQ ID NOs: 432, 434, and 436, respectively, or an amino acid sequence comprising no more than 1, 2, 3, 4, 5, or 6 modifications. In some embodiments, the LCDR1, LCDR2, and LCDR3 comprise the amino acid sequences of SEQ ID NOs: 433, 435, and 437, respectively, or an amino acid sequence comprising no more than 1, 2, 3, 4, 5, or 6 modifications. In one aspect, provided herein is an antibody molecule (e.g., an isolated antibody molecule) that binds to CSF1R (e.g., human CSF1R), comprising a light chain variable region (VL) comprising a light chain complementarity determining region 1 (LCDR1), a LCDR2, and a LCDR3, wherein the LCDR1, LCDR2, and LCDR3 comprise the amino acid sequences of SEQ ID NOs: 432, 434, and 436, respectively, or SEQ ID NOs: 433, 435, and 437, respectively, or an amino acid sequence comprising no more than 1, 2, 3, 4, 5, or 6 modifications.

[0132] In some embodiments, the HCDR1, HCDR2, and HCDR3 comprise the amino acid sequences of SEQ ID NOs: 402, 476, and 477, respectively, or an amino acid sequence comprising no more than 1, 2, 3, 4, 5, or 6 modifications.

[0133] In some embodiments, the HCDR1, HCDR2, and HCDR3 comprise the amino acid sequences of: SEQ ID NOs: 402, 404, and 413, respectively, or an amino acid sequence comprising no more than 1, 2, 3, 4, 5, or 6 modifications; SEQ ID NOs: 402, 405, and 413, respectively, or an amino acid sequence comprising no more than 1, 2, 3, 4, 5, or 6 modifications; SEQ ID NOs: 402, 406, and 413, respectively, or an amino acid sequence comprising no more than 1, 2, 3, 4, 5, or 6 modifications; SEQ ID NOs: 402, 404, and 414, respectively, or an amino acid sequence comprising no more than 1, 2, 3, 4, 5, or 6 modifications; SEQ ID NOs: 402, 407, and 413, respectively, or an amino acid sequence comprising no more than 1, 2, 3, 4, 5, or 6 modifications; SEQ ID NOs: 402, 404, and 415, respectively, or an amino acid sequence comprising no more than 1, 2, 3, 4, 5, or 6 modifications; SEQ ID NOs: 402, 408, and 413, respectively, or an amino acid sequence comprising no more than 1, 2, 3, 4, 5, or 6 modifications; SEQ ID NOs: 402, 404, and 416, respectively, or an amino acid sequence comprising no more than 1, 2, 3, 4, 5, or 6 modifications; SEQ ID NOs: 402, 404, and 417, respectively, or an amino acid sequence comprising no more than 1, 2, 3, 4, 5, or 6 modifications; SEQ ID NOs: 402, 409, and 413, respectively, or an amino acid sequence comprising no more than 1, 2, 3, 4, 5, or 6 modifications; SEQ ID NOs: 402, 404, and 418, respectively, or an amino acid sequence comprising no more than 1, 2, 3, 4, 5, or 6 modifications; SEQ ID NOs: 402, 404, and 419, respectively, or an amino acid sequence comprising no more than 1, 2, 3, 4, 5, or 6 modifications; SEQ ID NOs: 402, 404, and 420, respectively, or an amino acid sequence comprising no more than 1, 2, 3, 4, 5, or 6 modifications; or SEQ ID NOs: 402, 404, and 421, respectively, or an amino acid sequence comprising no more than 1, 2, 3, 4, 5, or 6 modifications. In some embodiments, the HCDR1, HCDR2, and HCDR3 comprise the amino acid sequences of SEQ ID NOs: 402, 404, and 413, respectively. In some embodiments, the HCDR1, HCDR2, and HCDR3 comprise the amino acid sequences of SEQ ID NOs: 402, 405, and 413, respectively. In some embodiments, the HCDR1, HCDR2, and HCDR3 comprise the amino acid sequences of SEQ ID NOs: 402, 406, and 413, respectively. In some embodiments, the HCDR1, HCDR2, and HCDR3 comprise the amino acid sequences of SEQ ID NOs: 402, 404, and 414, respectively. In some embodiments, the HCDR1, HCDR2, and HCDR3 comprise the amino acid sequences of SEQ ID NOs: 402, 407, and 413, respectively. In some embodiments, the HCDR1, HCDR2, and HCDR3 comprise the amino acid sequences of SEQ ID NOs: 402, 404, and 415, respectively. In some embodiments, the HCDR1, HCDR2, and HCDR3 comprise the amino acid sequences of SEQ ID NOs: 402, 408, and 413, respectively. In some embodiments, the HCDR1, HCDR2, and HCDR3 comprise the amino acid sequences of SEQ ID NOs: 402, 404, and 416, respectively. In some embodiments, the HCDR1, HCDR2, and HCDR3 comprise the amino acid sequences of SEQ ID NOs: 402, 404, and 417, respectively. In some embodiments, the HCDR1, HCDR2, and HCDR3 comprise the amino acid sequences of SEQ ID NOs: 402, 409, and 413, respectively. In some embodiments, the HCDR1, HCDR2, and HCDR3 comprise the amino acid sequences of SEQ ID NOs: 402, 404, and 418, respectively. In some embodiments, the HCDR1, HCDR2, and HCDR3 comprise the amino acid sequences of SEQ ID NOs: 402, 404, and 419, respectively. In some embodiments, the HCDR1, HCDR2, and HCDR3 comprise the amino acid sequences of SEQ ID NOs: 402, 404, and 420, respectively. In some embodiments, the HCDR1, HCDR2, and HCDR3 comprise the amino acid sequences of SEQ ID NOs: 402, 404, and 421, respectively.

[0134] In some embodiments, the LCDR1, LCDR2, and LCDR3 comprise the amino acid sequences of SEQ ID NOs: 432, 434, and 436, respectively. In some embodiments, the LCDR1, LCDR2, and LCDR3 comprise the amino acid sequences of SEQ ID NOs: 433, 435, and 437, respectively.

[0135] In some embodiments, the HCDR1, HCDR2, HCDR3, LCDR1, LCDR2, and LCDR3 comprise the amino acid sequences of SEQ ID NOs: 402, 404, 413, 432, 434, and 436, respectively. In some embodiments, the HCDR1, HCDR2, HCDR3, LCDR1, LCDR2, and LCDR3 comprise the amino acid sequences of SEQ ID NOs: 402, 405, 413, 432, 434, and 436, respectively. In some embodiments, the HCDR1, HCDR2, HCDR3, LCDR1, LCDR2, and LCDR3 comprise the amino acid sequences of SEQ ID NOs: 402, 406, 413, 432, 434, and 436, respectively. In some embodiments, the HCDR1, HCDR2, HCDR3, LCDR1, LCDR2, and LCDR3 comprise the amino acid sequences of SEQ ID NOs: 402, 404, 414, 432, 434, and 436, respectively. In some embodiments, the HCDR1, HCDR2, HCDR3, LCDR1, LCDR2, and LCDR3 comprise the amino acid sequences of SEQ ID NOs: 402, 407, 413, 432, 434, and 436, respectively. In some embodiments, the HCDR1, HCDR2, HCDR3, LCDR1, LCDR2, and LCDR3 comprise the amino acid sequences of SEQ ID NOs: 402, 404, 415, 432, 434, and 436, respectively. In some embodiments, the HCDR1, HCDR2, HCDR3, LCDR1, LCDR2, and LCDR3 comprise the amino acid sequences of SEQ ID NOs: 402, 408, 413, 432, 434, and 436, respectively. In some embodiments, the HCDR1, HCDR2, HCDR3, LCDR1, LCDR2, and LCDR3 comprise the amino acid sequences of SEQ ID NOs: 402, 404, 416, 432, 434, and 436, respectively. In some embodiments, the HCDR1, HCDR2, HCDR3, LCDR1, LCDR2, and LCDR3 comprise the amino acid sequences of SEQ ID NOs: 402, 404, 417, 432, 434, and 436, respectively. In some embodiments, the HCDR1, HCDR2, HCDR3, LCDR1, LCDR2, and LCDR3 comprise the amino acid sequences of SEQ ID NOs: 402, 409, 413, 432, 434, and 436, respectively. In some embodiments, the HCDR1, HCDR2, HCDR3, LCDR1, LCDR2, and LCDR3 comprise the amino acid sequences of SEQ ID NOs: 402, 404, 418, 432, 434, and 436, respectively. In some embodiments, the HCDR1, HCDR2, HCDR3, LCDR1, LCDR2, and LCDR3 comprise the amino acid sequences of SEQ ID NOs: 402, 404, 419, 432, 434, and 436, respectively. In some embodiments, the HCDR1, HCDR2, HCDR3, LCDR1, LCDR2, and LCDR3 comprise the amino acid sequences of SEQ ID NOs: 402, 404, 420, 432, 434, and 436, respectively. In some embodiments, the HCDR1, HCDR2, HCDR3, LCDR1, LCDR2, and LCDR3 comprise the amino acid sequences of SEQ ID NOs: 402, 404, 421, 432, 434, and 436, respectively.

[0136] In some embodiments, the VH comprises the amino acid sequence of SEQ ID NO: 323, or an amino acid sequence having at least 90, 92, 94, 96, 98, or 99% identity thereto. In some embodiments, the VH comprises the amino acid sequence of SEQ ID NO: 324, or an amino acid sequence having at least 90, 92, 94, 96, 98, or 99% identity thereto. In some embodiments, the VH comprises the amino acid sequence of SEQ ID NO: 325, or an amino acid sequence having at least 90, 92, 94, 96, 98, or 99% identity thereto. In some embodiments, the VH comprises the amino acid sequence of SEQ ID NO: 326, or an amino acid sequence having at least 90, 92, 94, 96, 98, or 99% identity thereto. In some embodiments, the VH comprises the amino acid sequence of SEQ ID NO: 327, or an amino acid sequence having at least 90, 92, 94, 96, 98, or 99% identity thereto. In some embodiments, the VH comprises the amino acid sequence of SEQ ID NO: 328, or an amino acid sequence having at least 90, 92, 94, 96, 98, or 99% identity thereto. In some embodiments, the VH comprises the amino acid sequence of SEQ ID NO: 329, or an amino acid sequence having at least 90, 92, 94, 96, 98, or 99% identity thereto. In some embodiments, the VH comprises the amino acid sequence of SEQ ID NO: 330, or an amino acid sequence having at least 90, 92, 94, 96, 98, or 99% identity thereto. In some embodiments, the VH comprises the amino acid sequence of SEQ ID NO: 331, or an amino acid sequence having at least 90, 92, 94, 96, 98, or 99% identity thereto. In some embodiments, the VH comprises the amino acid sequence of SEQ ID NO: 332, or an amino acid sequence having at least 90, 92, 94, 96, 98, or 99% identity thereto. In some embodiments, the VH comprises the amino acid sequence of SEQ ID NO: 333, or an amino acid sequence having at least 90, 92, 94, 96, 98, or 99% identity thereto. In some embodiments, the VH comprises the amino acid sequence of SEQ ID NO: 334, or an amino acid sequence having at least 90, 92, 94, 96, 98, or 99% identity thereto. In some embodiments, the VH comprises the amino acid sequence of SEQ ID NO: 335, or an amino acid sequence having at least 90, 92, 94, 96, 98, or 99% identity thereto. In some embodiments, the VH comprises the amino acid sequence of SEQ ID NO: 336, or an amino acid sequence having at least 90, 92, 94, 96, 98, or 99% identity thereto.

[0137] In some embodiments, the VL comprises the amino acid sequence of SEQ ID NO: 341, or an amino acid sequence having at least 90, 92, 94, 96, 98, or 99% identity thereto. In some embodiments, the VL comprises the amino acid sequence of SEQ ID NO: 342, or an amino acid sequence having at least 90, 92, 94, 96, 98, or 99% identity thereto.

[0138] In some embodiments, the VH and VL comprise the amino acid sequences of SEQ ID NOs: 323 and 341, respectively. In some embodiments, the VH and VL comprise the amino acid sequences of SEQ ID NOs: 324 and 341, respectively. In some embodiments, the VH and VL comprise the amino acid sequences of SEQ ID NOs: 325 and 341, respectively. In some embodiments, the VH and VL comprise the amino acid sequences of SEQ ID NOs: 326 and 341, respectively. In some embodiments, the VH and VL comprise the amino acid sequences of SEQ ID NOs: 327 and 341, respectively. In some embodiments, the VH and VL comprise the amino acid sequences of SEQ ID NOs: 328 and 341, respectively. In some embodiments, the VH and VL comprise the amino acid sequences of SEQ ID NOs: 329 and 341, respectively. In some embodiments, the VH and VL comprise the amino acid sequences of SEQ ID NOs: 330 and 341, respectively. In some embodiments, the VH and VL comprise the amino acid sequences of SEQ ID NOs: 331 and 341, respectively. In some embodiments, the VH and VL comprise the amino acid sequences of SEQ ID NOs: 332 and 341, respectively. In some embodiments, the VH and VL comprise the amino acid sequences of SEQ ID NOs: 333 and 341, respectively. In some embodiments, the VH and VL comprise the amino acid sequences of SEQ ID NOs: 334 and 341, respectively. In some embodiments, the VH and VL comprise the amino acid sequences of SEQ ID NOs: 335 and 341, respectively. In some embodiments, the VH and VL comprise the amino acid sequences of SEQ ID NOs: 336 and 341, respectively.

[0139] In one aspect, disclosed herein is an antibody molecule (e.g., an isolated antibody molecule) that binds to CSF1R (e.g., human CSF1R), comprising a heavy chain variable region (VH) comprising a heavy chain complementarity determining region 1 (HCDR1), a HCDR2, and a HCDR3, wherein the HCDR1, HCDR2, and HCDR3 comprise the amino acid sequences of SEQ ID NOs: 403, 478, and 479, respectively, or an amino acid sequence comprising no more than 1, 2, 3, 4, 5, or 6 modifications. In some embodiments, the antibody molecule further comprises a light chain variable region (VL) comprising a light chain complementarity determining region 1 (LCDR1), a LCDR2, and a LCDR3. In some embodiments, the LCDR1, LCDR2, and LCDR3 comprise the amino acid sequences of SEQ ID NOs: 432, 434, and 436, respectively, or an amino acid sequence comprising no more than 1, 2, 3, 4, 5, or 6 modifications. In some embodiments, the LCDR1, LCDR2, and LCDR3 comprise the amino acid sequences of SEQ ID NOs: 433, 435, and 437, respectively, or an amino acid sequence comprising no more than 1, 2, 3, 4, 5, or 6 modifications. In one aspect, disclosed herein is an antibody molecule (e.g., an isolated antibody molecule) that binds to CSF1R (e.g., human CSF1R), comprising a light chain variable region (VL) comprising a light chain complementarity determining region 1 (LCDR1), a LCDR2, and a LCDR3, wherein the LCDR1, LCDR2, and LCDR3 comprise the amino acid sequences of SEQ ID NOs: 432, 434, and 436, respectively, or SEQ ID NOs: 433, 435, and 437, respectively, or an amino acid sequence comprising no more than 1, 2, 3, 4, 5, or 6 modifications.

[0140] In some embodiments, the HCDR1, HCDR2, and HCDR3 comprise the amino acid sequences of: SEQ ID NOs: 403, 410, and 422, respectively, or an amino acid sequence comprising no more than 1, 2, 3, 4, 5, or 6 modifications; SEQ ID NOs: 403, 410, and 423, respectively, or an amino acid sequence comprising no more than 1, 2, 3, 4, 5, or 6 modifications; SEQ ID NOs: 403, 411, and 422, respectively, or an amino acid sequence comprising no more than 1, 2, 3, 4, 5, or 6 modifications; or SEQ ID NOs: 403, 412, and 422, respectively, or an amino acid sequence comprising no more than 1, 2, 3, 4, 5, or 6 modifications.

[0141] In some embodiments, the LCDR1, LCDR2, and LCDR3 comprise the amino acid sequences of SEQ ID NOs: 432, 434, and 436, respectively. In some embodiments, the LCDR1, LCDR2, and LCDR3 comprise the amino acid sequences of SEQ ID NOs: 433, 435, and 437, respectively.

[0142] In some embodiments, the HCDR1, HCDR2, HCDR3, LCDR1, LCDR2, and LCDR3 comprise the amino acid sequences of SEQ ID NOs: 403, 410, 422, 433, 435, and 437, respectively. In some embodiments, the HCDR1, HCDR2, HCDR3, LCDR1, LCDR2, and LCDR3 comprise the amino acid sequences of SEQ ID NOs: 403, 410, 423, 433, 435, and 437, respectively. In some embodiments, the HCDR1, HCDR2, HCDR3, LCDR1, LCDR2, and LCDR3 comprise the amino acid sequences of SEQ ID NOs: 403, 411, 422, 433, 435, and 437, respectively. In some embodiments, the HCDR1, HCDR2, HCDR3, LCDR1, LCDR2, and LCDR3 comprise the amino acid sequences of SEQ ID NOs: 403, 412, 422, 433, 435, and 437, respectively.

[0143] In some embodiments, the VH comprises the amino acid sequence of SEQ ID NO: 337, or an amino acid sequence having at least 90, 92, 94, 96, 98, or 99% identity thereto. In some embodiments, the VH comprises the amino acid sequence of SEQ ID NO: 338, or an amino acid sequence having at least 90, 92, 94, 96, 98, or 99% identity thereto. In some embodiments, the VH comprises the amino acid sequence of SEQ ID NO: 339, or an amino acid sequence having at least 90, 92, 94, 96, 98, or 99% identity thereto. In some embodiments, the VH comprises the amino acid sequence of SEQ ID NO: 340, or an amino acid sequence having at least 90, 92, 94, 96, 98, or 99% identity thereto.

[0144] In some embodiments, the VL comprises the amino acid sequence of SEQ ID NO: 139, or an amino acid sequence having at least 90, 92, 94, 96, 98, or 99% identity thereto. In some embodiments, the VL comprises the amino acid sequence of SEQ ID NO: 341, or an amino acid sequence having at least 90, 92, 94, 96, 98, or 99% identity thereto. In some embodiments, the VL comprises the amino acid sequence of SEQ ID NO: 342, or an amino acid sequence having at least 90, 92, 94, 96, 98, or 99% identity thereto.

[0145] In some embodiments, the VH and VL comprise the amino acid sequences of SEQ ID NOs: 337 and 342, respectively. In some embodiments, the VH and VL comprise the amino acid sequences of SEQ ID NOs: 338 and 342, respectively. In some embodiments, the VH and VL comprise the amino acid sequences of SEQ ID NOs: 339 and 342, respectively. In some embodiments, the VH and VL comprise the amino acid sequences of SEQ ID NOs: 340 and 342, respectively. In some embodiments, the VH and VL comprise the amino acid sequences of SEQ ID NOs: 339 and 139, respectively.

[0146] In some embodiment, the antibody molecule binds to human and/or cynomolgus CSF1R, e.g., as measured using an ELISA analysis, e.g., as measured using methods described in Example 22 with respect to FIGS. 29A and 29B. In some embodiment, the antibody molecule binds to cells expressing human CSF1R, e.g., as measured using a flow cytometry analysis, e.g., as measured using methods described in Example 24 with respect to FIG. 31. In some embodiment, the antibody molecule reduces MCP-1 secretion from monocytes in the presence of CSF-1, e.g., as measured using an electrochemiluminescence analysis, e.g., as measured using methods described in Example 23 with respect to FIG. 30. In some embodiment, the antibody molecule reduces an activity of CSF1R.

[0147] In one aspect, provided herein is an antibody molecule (e.g., an isolated antibody molecule) that binds to CCR2 (e.g., human CCR2), comprising a heavy chain variable region (VH) comprising a heavy chain complementarity determining region 1 (HCDR1), a HCDR2, and a HCDR3, and a light chain variable region (VL) comprising a light chain complementarity determining region 1 (LCDR1), a LCDR2, and a LCDR3, wherein the HCDR1, HCDR2, HCDR3, LCDR1, LCDR2, and LCDR3 comprise the amino acid sequences of SEQ ID NOs: 446, 447, 448, 454, 455, and 456, respectively, or an amino acid sequence comprising no more than 1, 2, 3, 4, 5, or 6 modifications, and wherein:

[0148] (i) the VH does not comprise the amino acid sequence of SEQ ID NO: 480, and/or

[0149] (ii) the VL does not comprise the amino acid sequence of SEQ ID NO: 481.

[0150] In some embodiments, the HCDR1, HCDR2, HCDR3, LCDR1, LCDR2, and LCDR3 comprise the amino acid sequences of SEQ ID NOs: 446, 447, 448, 454, 455, and 456, respectively. In some embodiments, the VH comprises the amino acid sequence of SEQ ID NO: 343, or an amino acid sequence having at least 90, 92, 94, 96, 98, or 99% identity thereto. In some embodiments, the VH comprises the amino acid sequence of SEQ ID NO: 344, or an amino acid sequence having at least 90, 92, 94, 96, 98, or 99% identity thereto. In some embodiments, the VL comprises the amino acid sequence of SEQ ID NO: 345, or an amino acid sequence having at least 90, 92, 94, 96, 98, or 99% identity thereto. In some embodiments, the VH and VL comprise the amino acid sequences of SEQ ID NOs: 343 and 345, respectively. In some embodiments, the VH and VL comprise the amino acid sequences of SEQ ID NOs: 344 and 345, respectively.

[0151] In one aspect, provided herein is an antibody molecule (e.g., an isolated antibody molecule) that binds to PD-L1 (e.g., human PD-L1), comprising a heavy chain variable region (VH) comprising a heavy chain complementarity determining region 1 (HCDR1), a HCDR2, and a HCDR3, wherein the HCDR1, HCDR2, and HCDR3 comprise the amino acid sequences of SEQ ID NOs: 461, 462, and 463, respectively, or an amino acid sequence comprising no more than 1, 2, 3, 4, 5, or 6 modifications. In some embodiments, the antibody molecule further comprises a light chain variable region (VL) comprising a light chain complementarity determining region 1 (LCDR1), a LCDR2, and a LCDR3, wherein the LCDR1, LCDR2, and LCDR3 comprise the amino acid sequences of SEQ ID NOs: 467, 468, and 469, respectively, or an amino acid sequence comprising no more than 1, 2, 3, 4, 5, or 6 modifications. In one aspect, provided herein is an antibody molecule (e.g., an isolated antibody molecule) that binds to PD-L1 (e.g., human PD-L1), comprising a light chain variable region (VL) comprising a light chain complementarity determining region 1 (LCDR1), a LCDR2, and a LCDR3, wherein the LCDR1, LCDR2, and LCDR3 comprise the amino acid sequences of SEQ ID NOs: 467, 468, and 469, respectively, or an amino acid sequence comprising no more than 1, 2, 3, 4, 5, or 6 modifications. In some embodiments, the HCDR1, HCDR2, HCDR3, LCDR1, LCDR2, and LCDR3 comprise the amino acid sequences of SEQ ID NOs: 461, 462, 463, 467, 468, and 469, respectively. In some embodiments, the VH comprises the amino acid sequence of SEQ ID NO: 346, or an amino acid sequence having at least 90, 92, 94, 96, 98, or 99% identity thereto. In some embodiments, the VL comprises the amino acid sequence of SEQ ID NO: 347, or an amino acid sequence having at least 90, 92, 94, 96, 98, or 99% identity thereto. In some embodiments, the VH and VL comprise the amino acid sequences of SEQ ID NOs: 346 and 347, respectively.

[0152] In some embodiments of the aforementioned aspects, the antibody molecule comprises a heavy chain constant region chosen from IgG1, IgG2, IgG3, or IgG4, or a fragment thereof. In some embodiments, the antibody molecule comprises a light chain constant region chosen from the light chain constant regions of kappa or lambda, or a fragment thereof.

[0153] In one aspect, provided herein is a multispecific, e.g., a bispecific, molecule, comprising an anti-CSF1R binding moiety and an anti-CCR2 binding moiety. In some embodiments, the anti-CSF1R binding moiety comprises an anti-CSF1R antibody molecule disclosed herein. In some embodiments, the anti-CCR2 binding moiety comprises an anti-CCR2 antibody molecule disclosed herein. In some embodiments, the anti-CSF1R binding moiety comprises an anti-CSF1R antibody molecule disclosed herein and the anti-CCR2 binding moiety comprises an anti-CCR2 antibody molecule disclosed herein.

[0154] In some embodiments, the anti-CSF1R binding moiety comprises a heavy chain variable region (VH) comprising a heavy chain complementarity determining region 1 (HCDR1), a HCDR2, and a HCDR3, and a light chain variable region (VL) comprising a light chain complementarity determining region 1 (LCDR1), a LCDR2, and a LCDR3, wherein: (i) the HCDR1, HCDR2, and HCDR3 comprise the amino acid sequences of SEQ ID NOs: 402, 474, and 475, respectively; and (ii) the LCDR1, LCDR2, and LCDR3 comprise the amino acid sequences of SEQ ID NOs: 432, 434, and 436, respectively, or SEQ ID NOs: 433, 435, and 437, respectively. In some embodiments, the HCDR1, HCDR2, and HCDR3 comprise the amino acid sequences of SEQ ID NOs: 402, 476, and 477, respectively. In some embodiments, the HCDR1, HCDR2, and HCDR3 comprise the amino acid sequences of: SEQ ID NOs: 402, 404, and 413, respectively; SEQ ID NOs: 402, 405, and 413, respectively; SEQ ID NOs: 402, 406, and 413, respectively; SEQ ID NOs: 402, 404, and 414, respectively; SEQ ID NOs: 402, 407, and 413, respectively; SEQ ID NOs: 402, 404, and 415, respectively; SEQ ID NOs: 402, 408, and 413, respectively; SEQ ID NOs: 402, 404, and 416, respectively; SEQ ID NOs: 402, 404, and 417, respectively; SEQ ID NOs: 402, 409, and 413, respectively; SEQ ID NOs: 402, 404, and 418, respectively; SEQ ID NOs: 402, 404, and 419, respectively; SEQ ID NOs: 402, 404, and 420, respectively; or SEQ ID NOs: 402, 404, and 421, respectively. In some embodiments, the LCDR1, LCDR2, and LCDR3 comprise the amino acid sequences of SEQ ID NOs: 432, 434, and 436, respectively. In some embodiments, the LCDR1, LCDR2, and LCDR3 comprise the amino acid sequences of SEQ ID NOs: 433, 435, and 437, respectively. In some embodiments, the HCDR1, HCDR2, HCDR3, LCDR1, LCDR2, and LCDR3 comprise the amino acid sequences of: SEQ ID NOs: 402, 404, 413, 432, 434, and 436, respectively; SEQ ID NOs: 402, 405, 413, 432, 434, and 436, respectively; SEQ ID NOs: 402, 406, 413, 432, 434, and 436, respectively; SEQ ID NOs: 402, 404, 414, 432, 434, and 436, respectively; SEQ ID NOs: 402, 407, 413, 432, 434, and 436, respectively; SEQ ID NOs: 402, 404, 415, 432, 434, and 436, respectively; SEQ ID NOs: 402, 408, 413, 432, 434, and 436, respectively; SEQ ID NOs: 402, 404, 416, 432, 434, and 436, respectively; SEQ ID NOs: 402, 404, 417, 432, 434, and 436, respectively; SEQ ID NOs: 402, 409, 413, 432, 434, and 436, respectively; SEQ ID NOs: 402, 404, 418, 432, 434, and 436, respectively; SEQ ID NOs: 402, 404, 419, 432, 434, and 436, respectively; SEQ ID NOs: 402, 404, 420, 432, 434, and 436, respectively; or SEQ ID NOs: 402, 404, 421, 432, 434, and 436, respectively. In some embodiments, the VH comprises the amino acid sequence of any of SEQ ID NOs: 323-336, or an amino acid sequence having at least 90, 92, 94, 96, 98, or 99% identity thereto. In some embodiments, the VL comprises the amino acid sequence of SEQ ID NO: 341 or 342, or an amino acid sequence having at least 90, 92, 94, 96, 98, or 99% identity thereto. In some embodiments, the VH and VL comprise the amino acid sequences of: SEQ ID NOs: 323 and 341, respectively; SEQ ID NOs: 324 and 341, respectively; SEQ ID NOs: 325 and 341, respectively; SEQ ID NOs: 326 and 341, respectively; SEQ ID NOs: 327 and 341, respectively; SEQ ID NOs: 328 and 341, respectively; SEQ ID NOs: 329 and 341, respectively; SEQ ID NOs: 330 and 341, respectively; SEQ ID NOs: 331 and 341, respectively; SEQ ID NOs: 332 and 341, respectively; SEQ ID NOs: 333 and 341, respectively; SEQ ID NOs: 334 and 341, respectively; SEQ ID NOs: 335 and 341, respectively; or SEQ ID NOs: 336 and 341, respectively.

[0155] In some embodiments, the anti-CSF1R binding moiety comprises a heavy chain variable region (VH) comprising a heavy chain complementarity determining region 1 (HCDR1), a HCDR2, and a HCDR3, and a light chain variable region (VL) comprising a light chain complementarity determining region 1 (LCDR1), a LCDR2, and a LCDR3, wherein: (i) the HCDR1, HCDR2, and HCDR3 comprise the amino acid sequences of SEQ ID NOs: 403, 478, and 479, respectively; and (ii) the LCDR1, LCDR2, and LCDR3 comprise the amino acid sequences of SEQ ID NOs: 432, 434, and 436, respectively, or SEQ ID NOs: 433, 435, and 437, respectively. In some embodiments, the HCDR1, HCDR2, and HCDR3 comprise the amino acid sequences of: SEQ ID NOs: 403, 410, and 422, respectively; SEQ ID NOs: 403, 410, and 423, respectively; SEQ ID NOs: 403, 411, and 422, respectively; or SEQ ID NOs: 403, 412, and 422, respectively. In some embodiments, the LCDR1, LCDR2, and LCDR3 comprise the amino acid sequences of SEQ ID NOs: 432, 434, and 436, respectively. In some embodiments, the LCDR1, LCDR2, and LCDR3 comprise the amino acid sequences of SEQ ID NOs: 433, 435, and 437, respectively. In some embodiments, the HCDR1, HCDR2, HCDR3, LCDR1, LCDR2, and LCDR3 comprise the amino acid sequences of: SEQ ID NOs: 403, 410, 422, 433, 435, and 437, respectively; SEQ ID NOs: 403, 410, 423, 433, 435, and 437, respectively; SEQ ID NOs: 403, 411, 422, 433, 435, and 437, respectively; or SEQ ID NOs: 403, 412, 422, 433, 435, and 437, respectively. In some embodiments, the VH comprises the amino acid sequence of any of SEQ ID NOs: 337-340, or an amino acid sequence having at least 90, 92, 94, 96, 98, or 99% identity thereto. In some embodiments, the VL comprises the amino acid sequence of SEQ ID NO: 341 or 342, or an amino acid sequence having at least 90, 92, 94, 96, 98, or 99% identity thereto. In some embodiments, the VH and VL comprise the amino acid sequences of: SEQ ID NOs: 337 and 342, respectively; SEQ ID NOs: 338 and 342, respectively; SEQ ID NOs: 339 and 342, respectively; or SEQ ID NOs: 340 and 342, respectively.

[0156] In some embodiments, the anti-CCR2 binding moiety comprises a heavy chain variable region (VH) comprising a heavy chain complementarity determining region 1 (HCDR1), a HCDR2, and a HCDR3, and a light chain variable region (VL) comprising a light chain complementarity determining region 1 (LCDR1), a LCDR2, and a LCDR3, wherein the HCDR1, HCDR2, HCDR3, LCDR1, LCDR2, and LCDR3 comprise the amino acid sequences of SEQ ID NOs: 446, 447, 448, 454, 455, and 456, respectively, and wherein: (i) the VH does not comprise the amino acid sequence of SEQ ID NO: 480, or (ii) the VL does not comprise the amino acid sequence of SEQ ID NO: 481. In some embodiments, the VH comprises the amino acid sequence of SEQ ID NO: 343 or 344, or an amino acid sequence having at least 90, 92, 94, 96, 98, or 99% identity thereto. In some embodiments, the VL comprises the amino acid sequence of SEQ ID NO: 345, or an amino acid sequence having at least 90, 92, 94, 96, 98, or 99% identity thereto. In some embodiments, the VH and VL comprise the amino acid sequences of: SEQ ID NOs: 343 and 345, respectively, or SEQ ID NOs: 344 and 345, respectively.

[0157] In some embodiments, the anti-CSF1R binding moiety and the anti-CCR2 binding moiety are, independently, a full antibody (e.g., an antibody that includes at least one, and preferably two, complete heavy chains, and at least one, and preferably two, complete light chains), or an antigen-binding fragment (e.g., a Fab, F(ab′)₂, Fv, a scFv, a single domain antibody, or a diabody (dAb)). In some embodiments, the anti-CSF1R binding moiety and/or the anti-CCR2 binding moiety comprises a heavy chain constant region chosen from IgG1, IgG2, IgG3, or IgG4, or a fragment thereof. In some embodiments, the anti-CSF1R binding moiety comprises a first heavy chain constant region (e.g., a first Fc region) and the anti-CCR2 binding moiety comprises a second heavy chain constant region (e.g., a second Fc region), wherein the first heavy chain constant region comprises one or more mutations that increase heterodimerization of the first heavy chain constant region and the second heavy chain constant region, relative to a naturally-existing heavy chain constant region, and/or wherein the second heavy chain constant region comprises one or more mutations that increase heterodimerization of the second heavy chain constant region and the first heavy chain constant region, relative to a naturally-existing heavy chain constant region. In some embodiments, the anti-CSF1R binding moiety and/or the anti-CCR2 binding moiety comprises a light chain constant region chosen from the light chain constant regions of kappa or lambda, or a fragment thereof. In some embodiments, the anti-CSF1R binding moiety comprises a kappa light chain constant region, or a fragment thereof, and the anti-CCR2 binding moiety comprises a lambda light chain constant region, or a fragment thereof. In some embodiments, the anti-CSF1R binding moiety comprises a lambda light chain constant region, or a fragment thereof, and the anti-CCR2 binding moiety comprises a kappa light chain constant region, or a fragment thereof. In some embodiments, the anti-CSF1R binding moiety and the anti-CCR2 binding moiety have a common light chain variable region.

[0158] In some embodiments, the multispecific molecule binds to CSF1R monovalently, and/or binds to CCR2 monovalently, optionally wherein the multispecific molecule binds to CSF1R monovalently, and binds to CCR2 monovalently. In some embodiments, the multispecific molecule inhibits CSF1R in the presence of CCR2, optionally wherein the multispecific molecule reduces an activity of CSF1R (e.g., CSF1R signaling, e.g., CSF1-induced CSF1R signaling) in a cell, e.g., by at least 40, 50, 60, 70, 80, or 90%, when the cell expresses both CSF1R and CCR2 on the cell surface. In some embodiments, the multispecific molecule does not inhibit or does not substantially inhibit CSF1R in the absence of CCR2, optionally wherein the multispecific molecule does not reduce an activity of CSF1R (e.g., CSF1R signaling, e.g., CSF1-induced CSF1R signaling), or does not reduce an activity of CSF1R by more than 2, 4, 6, 8, 10, or 15%, when the cell expresses CSF1R but not CCR2 on the cell surface. In some embodiments, the multispecific molecule inhibits CCR2 in the presence of CSF1R, optionally wherein the multispecific molecule reduces an activity of CCR2 in a cell, e.g., by at least 40, 50, 60, 70, 80, or 90%, when the cell expresses both CCR2 and CSF1R on the cell surface. In some embodiments, the multispecific molecule does not inhibit or does not substantially inhibit CCR2 in the absence of CSF1R, optionally wherein the multispecific molecule does not reduce an activity of CCR2, or does not reduce an activity of CCR2 by more than 2, 4, 6, 8, 10, or 15%, when the cell expresses CCR2 but not CSF1R on the cell surface.

[0159] In some embodiments, the multispecific molecule further comprises a TGF beta inhibitor. In some embodiments, the TGF beta inhibitor inhibits TGF-beta 1, TGF-beta 3, or both TGF-beta 1 and TGF-beta 3, e.g., as measured using the methods described in Example 20 with respect to FIG. 26B. In one embodiment, the TGF beta inhibitor inhibits TGF-beta 1, TGF-beta 2, TGF-beta 3, both TGF-beta 1 and TGF-beta 3, or TGF-beta 1, TGF-beta 2, and TGF-beta 3, e.g., as measured using the methods described in Example 20 with respect to FIG. 26B. In one embodiment, the TGF beta inhibitor comprises a TGF-beta receptor polypeptide (e.g., an extracellular domain of a TGF-beta receptor, or a functional variant thereof). In one embodiment, the TGF-beta inhibitor comprises one, two, or all of: a TGFBR1 polypeptide (e.g., 1, 2, 3, or more of a TGFBR1 polypeptide), a TGFBR2 polypeptide (e.g., 1, 2, 3, or more of a TGFBR2 polypeptide), or a TGFBR3 polypeptide (e.g., 1, 2, 3, or more of a TGFBR3 polypeptide). In one embodiment, the TGF-beta inhibitor comprises a TGFBR1 polypeptide. In one embodiment, the TGF-beta inhibitor comprises an extracellular domain of TGFBR1 or a sequence substantially identical thereto (e.g., a sequence that is at least 80%, 85%, 90%, or 95% identical thereto). In one embodiment, the TGF-beta inhibitor comprises an extracellular domain of SEQ ID NO: 95, 96, 97, 120, 121, or 122, or a sequence substantially identical thereto (e.g., a sequence that is at least 80%, 85%, 90%, or 95% identical thereto). In one embodiment, the TGF-beta inhibitor comprises the amino acid sequence of SEQ ID NO: 104 or 105, or a sequence substantially identical thereto (e.g., a sequence that is at least 80%, 85%, 90%, or 95% identical thereto). In some embodiments, the TGF beta inhibitor comprises a TGFBR2 polypeptide. In some embodiments, the TGF-beta inhibitor comprises an extracellular domain of TGFBR2 or a sequence substantially identical thereto (e.g., a sequence that is at least 80%, 85%, 90%, or 95% identical thereto). In some embodiments, the TGF-beta inhibitor comprises an extracellular domain of SEQ ID NO: 98, 99, 123, or 124, or a sequence substantially identical thereto (e.g., a sequence that is at least 80%, 85%, 90%, or 95% identical thereto). In some embodiments, the TGF-beta inhibitor comprises an amino acid sequence selected from the group consisting of SEQ ID NOs: 100, 101, 102, and 103, or a sequence substantially identical thereto (e.g., a sequence that is at least 80%, 85%, 90%, or 95% identical thereto). In one embodiment, the TGF-beta inhibitor comprises a TGFBR3 polypeptide. In one embodiment, the TGF-beta inhibitor comprises an extracellular domain of TGFBR3 or a sequence substantially identical thereto (e.g., a sequence that is at least 80%, 85%, 90%, or 95% identical thereto). In one embodiment, the TGF-beta inhibitor comprises an extracellular domain of SEQ ID NO: 106, 107, 125, or 126, or a sequence substantially identical thereto (e.g., a sequence that is at least 80%, 85%, 90%, or 95% identical thereto). In one embodiment, the TGF-beta inhibitor comprises the amino acid sequence of SEQ ID NO: 108, or a sequence substantially identical thereto (e.g., a sequence that is at least 80%, 85%, 90%, or 95% identical thereto). In one embodiment, the TGF-beta inhibitor comprises two TGF-beta receptor polypeptides that form a homodimer. In one embodiment, the TGF-beta inhibitor comprises two TGFBR1 polypeptides that form a homodimer. In one embodiment, the TGF-beta inhibitor comprises two TGFBR2 polypeptides that form a homodimer. In one embodiment, the TGF-beta inhibitor comprises two TGFBR3 polypeptides that form a homodimer. In one embodiment, the TGF-beta inhibitor comprises two TGF-beta receptor polypeptides that form a heterodimer. In one embodiment, the TGF-beta inhibitor comprises a TGFBR1 polypeptide and a TGFBR2 polypeptide that form a heterodimer. In one embodiment, the TGF-beta inhibitor comprises a TGFBR1 polypeptide and a TGFBR3 polypeptide that form a heterodimer. In one embodiment, the TGF-beta inhibitor comprises a TGFBR2 polypeptide and a TGFBR3 polypeptide that form a heterodimer.

[0160] In one embodiment, the TGF-beta inhibitor comprises a first TGF-beta receptor polypeptide and a second TGF-beta receptor polypeptide. In one embodiment, the multispecific molecule comprises a first Fc region (e.g., a first CH1-Fc region) and a second Fc region (e.g., a second CH1-Fc region), optionally wherein: (i) the first TGF-beta receptor polypeptide is linked, e.g., via a linker, to the first Fc region (e.g., a first CH1-Fc region), e.g., the C-terminus of the first Fc region (e.g., a first CH1-Fc region), and (ii) the second TGF-beta receptor polypeptide is linked, e.g., via a linker, to the second Fc region (e.g., a second CH1-Fc region), e.g., the C-terminus of the second Fc region (e.g., a second CH1-Fc region). In one embodiment, the first TGF-beta receptor polypeptide and the second TGF-beta receptor polypeptide form a homodimer or heterodimer, e.g., a homodimer. In one embodiment, the first or second TGF-beta receptor polypeptide comprises an extracellular domain of TGFBR1, TGFBR2, or TGFBR3, e.g., an extracellular domain of TGFBR2. In one embodiment, the multispecific molecule has the configuration of FIG. 35A or 35B. In one embodiment, the multispecific molecule comprises the amino acid sequence of SEQ ID NO: 192 (or a sequence substantially identical thereto, e.g., a sequence that is at least 80%, 85%, 90%, or 95% identical thereto) and the amino acid sequence of SEQ ID NO: 193 (or a sequence substantially identical thereto, e.g., a sequence that is at least 80%, 85%, 90%, or 95% identical thereto). In one embodiment, the multispecific molecule comprises the amino acid sequence of SEQ ID NO: 192 (or a sequence substantially identical thereto, e.g., a sequence that is at least 80%, 85%, 90%, or 95% identical thereto) and the amino acid sequence of SEQ ID NO: 195 (or a sequence substantially identical thereto, e.g., a sequence that is at least 80%, 85%, 90%, or 95% identical thereto). In one embodiment, the multispecific molecule comprises the amino acid sequence of SEQ ID NO: 194 (or a sequence substantially identical thereto, e.g., a sequence that is at least 80%, 85%, 90%, or 95% identical thereto) and the amino acid sequence of SEQ ID NO: 193 (or a sequence substantially identical thereto, e.g., a sequence that is at least 80%, 85%, 90%, or 95% identical thereto). In one embodiment, the multispecific molecule comprises the amino acid sequence of SEQ ID NO: 194 (or a sequence substantially identical thereto, e.g., a sequence that is at least 80%, 85%, 90%, or 95% identical thereto) and the amino acid sequence of SEQ ID NO: 195 (or a sequence substantially identical thereto, e.g., a sequence that is at least 80%, 85%, 90%, or 95% identical thereto).

[0161] In one embodiment, the TGF-beta inhibitor comprises a first TGF-beta receptor polypeptide and a second TGF-beta receptor polypeptide. In one embodiment, the multispecific molecule comprises a heavy chain constant region 1 (CH1) and a light chain constant region (CL), optionally wherein: (i) the first TGF-beta receptor polypeptide is linked, e.g., via a linker, to the CH1, e.g., the N-terminus of the CH1, and (ii) the second TGF-beta receptor polypeptide is linked, e.g., via a linker, to the CL, e.g., the N-terminus of the CL. In one embodiment, the first TGF-beta receptor polypeptide and the second TGF-beta receptor polypeptide form a homodimer or heterodimer, e.g., a homodimer. In one embodiment, the first or second TGF-beta receptor polypeptide comprises an extracellular domain of TGFBR1, TGFBR2, or TGFBR3, e.g., an extracellular domain of TGFBR2. In one embodiment, the multispecific molecule has the configuration of FIG. 35C or 35D. In one embodiment, the multispecific molecule comprises the amino acid sequence of SEQ ID NO: 196 (or a sequence substantially identical thereto, e.g., a sequence that is at least 80%, 85%, 90%, or 95% identical thereto) and the amino acid sequence of SEQ ID NO: 198 (or a sequence substantially identical thereto, e.g., a sequence that is at least 80%, 85%, 90%, or 95% identical thereto). In one embodiment, the multispecific molecule comprises the amino acid sequence of SEQ ID NO: 196 (or a sequence substantially identical thereto, e.g., a sequence that is at least 80%, 85%, 90%, or 95% identical thereto) and the amino acid sequence of SEQ ID NO: 199 (or a sequence substantially identical thereto, e.g., a sequence that is at least 80%, 85%, 90%, or 95% identical thereto). In one embodiment, the multispecific molecule comprises the amino acid sequence of SEQ ID NO: 197 (or a sequence substantially identical thereto, e.g., a sequence that is at least 80%, 85%, 90%, or 95% identical thereto) and the amino acid sequence of SEQ ID NO: 198 (or a sequence substantially identical thereto, e.g., a sequence that is at least 80%, 85%, 90%, or 95% identical thereto). In one embodiment, the multispecific molecule comprises the amino acid sequence of SEQ ID NO: 197 (or a sequence substantially identical thereto, e.g., a sequence that is at least 80%, 85%, 90%, or 95% identical thereto) and the amino acid sequence of SEQ ID NO: 199 (or a sequence substantially identical thereto, e.g., a sequence that is at least 80%, 85%, 90%, or 95% identical thereto).

[0162] In some embodiments, the multispecific molecule further comprises an anti-PD-L1 binding moiety. In some embodiments, the anti-PD-L1 binding moiety comprises an anti-PD-L1 antibody molecule disclosed herein. In some embodiments, the anti-PD-L1 binding moiety inhibits PD-L1. In some embodiments, the anti-PDL1 binding moiety comprises a heavy chain variable region (VH) comprising a heavy chain complementarity determining region 1 (HCDR1), a HCDR2, and a HCDR3, and a light chain variable region (VL) comprising a light chain complementarity determining region 1 (LCDR1), a LCDR2, and a LCDR3, wherein the HCDR1, HCDR2, HCDR3, LCDR1, LCDR2, and LCDR3 comprise the amino acid sequences of SEQ ID NOs: 461, 462, 463, 467, 468, and 469, respectively. In some embodiments, the VH comprises the amino acid sequence of SEQ ID NO: 346, or an amino acid sequence having at least 90, 92, 94, 96, 98, or 99% identity thereto. In some embodiments, the VL comprises the amino acid sequence of SEQ ID NO: 347, or an amino acid sequence having at least 90, 92, 94, 96, 98, or 99% identity thereto. In some embodiments, the VH and VL comprise the amino acid sequences of SEQ ID NOs: 346 and 347, respectively.

[0163] In some embodiments, the multispecific molecule further comprises an IL-2 molecule. In some embodiments, the IL-2 molecule is an IL-2 molecule disclosed herein, e.g., an IL-2 molecule comprising the amino acid sequence of SEQ ID NO: 237 or 238, or a sequence substantially identical thereto (e.g., a sequence that is at least 80%, 85%, 90%, or 95% identical thereto).

[0164] In some embodiments, the multispecific molecule comprises one or more CDRs (e.g., 1, 2, or 3 CDRs), one or more (e.g., 1 or 2) heavy chain variable regions, one or more (e.g., 1 or 2) light chain variable regions, a heavy chain, or a light chain of an amino acid sequence disclosed in Table 25, or an amino acid sequence having at least 90, 92, 94, 96, 98, or 99% identity thereto. In some embodiments, the multispecific molecule comprises one or more CDRs (e.g., 1, 2, 3, 4, 5, 6, 7, 8, 9, 10, 11, or 12 CDRs), one or more (e.g., 1 or 2) heavy chain variable regions, one or more (e.g., 1 or 2) light chain variable regions, one or more (e.g., 1 or 2) heavy chains, and/or one or more (e.g., 1 or 2) light chains of a multispecific molecule disclosed in Table 34 or Table 28. In some embodiments, the multispecific molecule comprises a multispecific molecule disclosed in Table 34 or Table 28. In some embodiments, the multispecific molecule is or comprises any of molecules 10-86 disclosed in Table 34. In some embodiments, the multispecific molecule is or comprises BIM0648 or BIM0652 disclosed in Table 34. In some embodiments, the multispecific molecule is or comprises any of molecules 10-86 disclosed in Table 28. In some embodiments, the multispecific molecule is or comprises any of molecules BIM0204, BIM0205, BIM0206, BIM0207, BIM0208, BIM0209, BIM0210, BIM0211, BIM0542, BIM0543, BIM0544, BIM0545, BIM0546, BIM0547, BIM0548, BIM0549, BIM0550, BIM0551, BIM0552, BIM0553, BIM0554, BIM0555, BIM0556, BIM0566, and BIM0567 disclosed in Table 28.

[0165] In some embodiments, the multispecific molecule has a configuration shown in any of FIGS. 12A-12J.

[0166] In one aspect, disclosed herein is a multispecific molecule comprising: (i) an anti-CSF1R binding moiety (e.g., an anti-CSF1R antibody molecule); (ii) an anti-CCR2 binding moiety (e.g., an anti-CCR2 antibody molecule); and (iii) a TGF-beta inhibitor. In some embodiments, the multispecific molecule has one or more (e.g., 1, 2, 3, 4, 5, 6, 7, 8, 9, 10, 11, 12, 13, 14, 15, 16, or more) of the following properties:

(i) the multispecific molecule preferentially binds to a CSF1R-positive, CCR2-positive cell relative to a CSF1R-positive, CCR2-negative cell, or a CSF1R-negative, CCR2-positive cell, e.g., the binding of the multispecific molecule to the CSF1R-positive, CCR2-positive cell is at least 2, 4, 6, 8, 10, 15, 20, or 25-fold stronger than the binding of the multispecific molecule to the CSF1R-positive, CCR2-negative cell, or the CSF1R-negative, CCR2-positive cell, e.g., as measured using a flow cytometry analysis, e.g., as measured using methods described in Example 2 with respect to FIG. 1;
(ii) the multispecific molecule preferentially binds to a CSF1R-positive, CCR2-positive cell relative to a CSF1R-positive, CCR2-negative cell, e.g., the EC50 of the multispecific molecule for binding to a CSF1R-positive, CCR2-positive cell is no more than 60, 50, 40, 30, 20, or 10% of the EC50 of the multispecific molecule for binding to a CSF1R-positive, CCR2-negative cell, e.g., as measured using a flow cytometry analysis, e.g., as measured using methods described in Example 2 with respect to FIG. 1;

[0167] (iii) the multispecific molecule preferentially binds to a CSF1R-positive, CCR2-positive cell relative to a CSF1R-negative, CCR2-positive cell, e.g., the EC50 of the multispecific molecule for binding to a CSF1R-positive, CCR2-positive cell is no more than 50, 40, 30, 20, 10, or 5% of the EC50 of the multispecific molecule for binding to a CSF1R-negative, CCR2-positive cell, e.g., as measured using a flow cytometry analysis, e.g., as measured using methods described in Example 2 with respect to FIG. 1;

[0168] (iv) the multispecific molecule preferentially binds to tumor-associated macrophages (TAMs) or myeloid derived suppressor cells (MDSCs) relative to T cells, NK cells, neutrophils, tissue-resident macrophages (e.g., Kupffer cells), or Langerhans cells, e.g., the binding of the multispecific molecule to TAMs or MDSCs is at least 2, 4, 6, 8, 10, 15, 20, or 25-fold stronger than the binding of the multispecific molecule to T cells, NK cells, neutrophils, tissue-resident macrophages (e.g., Kupffer cells), or Langerhans cells, e.g., as measured using a flow cytometry analysis, e.g., as measured using methods described in Example 6 with respect to FIG. 5;

[0169] (v) the multispecific molecule inhibits monocyte migration, e.g., monocyte chemoattractant protein 1 (MCP1)-induced monocyte migration, e.g., reduces MCP1-induced monocyte migration by at least 40, 50, 60, or 70%, e.g., as measured using a transwell plate migration assay, e.g., as measured using methods described in Example 3 with respect to FIG. 2;

[0170] (vi) the multispecific molecule inhibits the proliferation of macrophages, e.g., bone marrow-derived macrophages, e.g., CSF-1-induced proliferation of bone marrow-derived macrophages, e.g., reduces CSF-1-induced proliferation of bone marrow-derived macrophages by at least 50, 60, 70, or 80%, e.g., as measured using a cell proliferation MTT assay, e.g., as measured using methods described in Example 4 with respect to FIG. 3B;

[0171] (vii) the multispecific molecule does not inhibit or does not substantially inhibit the differentiation of monocytes, e.g., bone marrow-derived monocytes, e.g., CSF-1-induced differentiation of bone marrow-derived monocytes, e.g., does not reduce CSF-1-induced differentiation of bone marrow-derived monocytes by more than 2, 4, 6, 8, or 10%, e.g., as measured using a flow cytometry analysis, e.g., as measured using methods described in Example 5 with respect to FIG. 4;

[0172] (viii) the multispecific molecule depletes suppressive myeloid cells, e.g., TAMs or MDSCs, e.g., reduces the number of suppressive myeloid cells, e.g., TAMs or MDSCs, by at least 80, 85, 90, 95, 99, or 99.5%, in vivo, e.g., as measured using a flow cytometry analysis, e.g., as measured using methods described in Example 7 with respect to FIG. 6;

[0173] (ix) the multispecific molecule does not deplete or does not substantially deplete tissue-resident macrophages, e.g., Kupffer cells, e.g., does not reduce the number of tissue-resident macrophages, e.g., Kupffer cells, by more than 4, 6, 8, 10, or 15%, in vivo, e.g., as measured using an immunohistochemistry analysis, e.g., as measured using methods described in Example 8 with respect to FIGS. 7B and 7D;

[0174] (x) the multispecific molecule increases CD86 or MHC class II expression on TAMs, e.g., as measured using a flow cytometry analysis or an immunohistochemistry analysis, e.g., as measured using methods described with respect to FIG. 21;

[0175] (xi) the multispecific molecule does not inhibit or does not substantially inhibit CSF-1 dependent cell survival of CSF1R-positive, CCR2-negative cells, e.g., does not reduce CSF-1 dependent cell survival of CSF1R-positive, CCR2-negative cells by more than 5, 10, or 15%, e.g., as measured using a cell viability MTT assay, e.g., as measured using methods described in Example 9 with respect to FIG. 8A;

[0176] (xii) the multispecific molecule increases CD8+ T cell tumor infiltration in vivo, e.g., increases % CD8+ T cells in CD3+ T cells in tumor by at least 1.5, 2, or 2.5-fold, e.g., as measured using a flow cytometry analysis, e.g., as measured using methods described in Example 10 with respect to FIG. 9;

[0177] (xiii) the multispecific molecule reduces Treg frequency in tumor in vivo, e.g., reduces Treg frequency in tumor by at least 15, 20, 25, or 30%, e.g., as measured using a flow cytometry analysis, e.g., as measured using methods described in Example 11 with respect to FIG. 10A; (xiv) the multispecific molecule increases the CD8+ T cell/Treg ratio in tumor in vivo, e.g., increases the CD8+ T cell/Treg ratio in tumor by at least 2.5, 3, 3.5, 4, or 4.5-fold, e.g., as measured using a flow cytometry analysis, e.g., as measured using methods described in Example 11 with respect to FIG. 10B;

[0178] (xv) the multispecific molecule reduces tumor growth, increases survival of a tumor-bearing animal, and/or enhances anti-tumor immune memory, e.g., as measured using methods described in Example 12 with respect to FIGS. 11A and 111B, or Example 19 with respect to FIG. 23;

[0179] (xvi) the multispecific molecule preferentially binds to classical monocytes relative to intermediate monocytes or non-classical monocytes, e.g., as measured using methods described in Example 28 with respect to FIGS. 39B and 39D; or

[0180] (xvii) the multispecific molecule reduces the activity of TGFβ, e.g., by at least 30, 40, 50, 60, 70, 80, or 90%, e.g., as measured using methods described in Example 28 with respect to FIGS. 40A-40F.

[0181] In some embodiments, the anti-CSF1R binding moiety comprises a heavy chain variable region (VH) comprising a heavy chain complementarity determining region 1 (HCDR1), a HCDR2, and a HCDR3, and a light chain variable region (VL) comprising a light chain complementarity determining region 1 (LCDR1), a LCDR2, and a LCDR3, wherein the HCDR1, HCDR2, HCDR3, LCDR1, LCDR2, and LCDR3 comprise the amino acid sequences of SEQ ID NOs: 402, 474, 475, 432, 434, and 436, respectively. In some embodiments, the HCDR1, HCDR2, and HCDR3 comprise the amino acid sequences of SEQ ID NOs: 402, 476, and 477, respectively. In some embodiments, the HCDR1, HCDR2, HCDR3, LCDR1, LCDR2, and LCDR3 comprise the amino acid sequences of SEQ ID NOs: 402, 405, 413, 432, 434, and 436, respectively. In some embodiments, the HCDR1, HCDR2, HCDR3, LCDR1, LCDR2, and LCDR3 comprise the amino acid sequences of SEQ ID NOs: 402, 404, 413, 432, 434, and 436, respectively. In some embodiments, the HCDR1, HCDR2, HCDR3, LCDR1, LCDR2, and LCDR3 comprise the amino acid sequences of SEQ ID NOs: 402, 406, 413, 432, 434, and 436, respectively. In some embodiments, the HCDR1, HCDR2, HCDR3, LCDR1, LCDR2, and LCDR3 comprise the amino acid sequences of SEQ ID NOs: 402, 404, 414, 432, 434, and 436, respectively. In some embodiments, the HCDR1, HCDR2, HCDR3, LCDR1, LCDR2, and LCDR3 comprise the amino acid sequences of SEQ ID NOs: 402, 407, 413, 432, 434, and 436, respectively. In some embodiments, the HCDR1, HCDR2, HCDR3, LCDR1, LCDR2, and LCDR3 comprise the amino acid sequences of SEQ ID NOs: 402, 404, 415, 432, 434, and 436, respectively. In some embodiments, the HCDR1, HCDR2, HCDR3, LCDR1, LCDR2, and LCDR3 comprise the amino acid sequences of SEQ ID NOs: 402, 408, 413, 432, 434, and 436, respectively. In some embodiments, the HCDR1, HCDR2, HCDR3, LCDR1, LCDR2, and LCDR3 comprise the amino acid sequences of SEQ ID NOs: 402, 404, 416, 432, 434, and 436, respectively. In some embodiments, the HCDR1, HCDR2, HCDR3, LCDR1, LCDR2, and LCDR3 comprise the amino acid sequences of SEQ ID NOs: 402, 404, 417, 432, 434, and 436, respectively. In some embodiments, the HCDR1, HCDR2, HCDR3, LCDR1, LCDR2, and LCDR3 comprise the amino acid sequences of SEQ ID NOs: 402, 409, 413, 432, 434, and 436, respectively. In some embodiments, the HCDR1, HCDR2, HCDR3, LCDR1, LCDR2, and LCDR3 comprise the amino acid sequences of SEQ ID NOs: 402, 404, 418, 432, 434, and 436, respectively. In some embodiments, the HCDR1, HCDR2, HCDR3, LCDR1, LCDR2, and LCDR3 comprise the amino acid sequences of SEQ ID NOs: 402, 404, 419, 432, 434, and 436, respectively. In some embodiments, the HCDR1, HCDR2, HCDR3, LCDR1, LCDR2, and LCDR3 comprise the amino acid sequences of SEQ ID NOs: 402, 404, 420, 432, 434, and 436, respectively. In some embodiments, the HCDR1, HCDR2, HCDR3, LCDR1, LCDR2, and LCDR3 comprise the amino acid sequences of SEQ ID NOs: 402, 404, 421, 432, 434, and 436, respectively.

[0182] In some embodiments, the VH comprises the amino acid sequence of any of SEQ ID NOs: 323-336, or an amino acid sequence having at least 80, 85, 90, or 95% identity thereto. In some embodiments, the VH comprises the amino acid sequence of SEQ ID NO: 324, or an amino acid sequence having at least 80, 85, 90, or 95% identity thereto. In some embodiments, the VH comprises an amino acid sequence encoded by the nucleotide sequence of SEQ ID NO: 129, or a nucleotide sequence having at least 80, 85, 90, or 95% identity thereto. In some embodiments, the VL comprises the amino acid sequence of SEQ ID NO: 341, or an amino acid sequence having at least 80, 85, 90, or 95% identity thereto. In some embodiments, the VL comprises an amino acid sequence encoded by the nucleotide sequence of SEQ ID NO: 130, or a nucleotide sequence having at least 80, 85, 90, or 95% identity thereto. In some embodiments, the VH and VL comprise the amino acid sequences of: SEQ ID NOs: 324 and 341, respectively, SEQ ID NOs: 323 and 341, respectively, SEQ ID NOs: 325 and 341, respectively, SEQ ID NOs: 326 and 341, respectively, SEQ ID NOs: 327 and 341, respectively, SEQ ID NOs: 328 and 341, respectively, SEQ ID NOs: 329 and 341, respectively, SEQ ID NOs: 330 and 341, respectively, SEQ ID NOs: 331 and 341, respectively, SEQ ID NOs: 332 and 341, respectively, SEQ ID NOs: 333 and 341, respectively, SEQ ID NOs: 334 and 341, respectively, SEQ ID NOs: 335 and 341, respectively, or SEQ ID NOs: 336 and 341, respectively.

[0183] In some embodiments, the multispecific molecule comprises the amino acid sequence of SEQ ID NO: 127, or an amino acid sequence having at least 80, 85, 90, or 95% identity thereto. In some embodiments, the multispecific molecule comprises an amino acid sequence encoded by the nucleotide sequence of SEQ ID NO: 128, or a nucleotide sequence having at least 80, 85, 90, or 95% identity thereto.

[0184] In some embodiments, the anti-CSF1R binding moiety comprises a heavy chain variable region (VH) comprising a heavy chain complementarity determining region 1 (HCDR1), a HCDR2, and a HCDR3, and a light chain variable region (VL) comprising a light chain complementarity determining region 1 (LCDR1), a LCDR2, and a LCDR3, wherein the HCDR1, HCDR2, HCDR3, LCDR1, LCDR2, and LCDR3 comprise the amino acid sequences of SEQ ID NOs: 403, 478, 479, 433, 435, and 437, respectively. In some embodiments, the HCDR1, HCDR2, HCDR3, LCDR1, LCDR2, and LCDR3 comprise the amino acid sequences of SEQ ID NOs: 403, 411, 422, 433, 435, and 437, respectively. In some embodiments, the HCDR1, HCDR2, HCDR3, LCDR1, LCDR2, and LCDR3 comprise the amino acid sequences of SEQ ID NOs: 403, 410, 422, 433, 435, and 437, respectively. In some embodiments, the HCDR1, HCDR2, HCDR3, LCDR1, LCDR2, and LCDR3 comprise the amino acid sequences of SEQ ID NOs: 403, 410, 423, 433, 435, and 437, respectively. In some embodiments, the HCDR1, HCDR2, HCDR3, LCDR1, LCDR2, and LCDR3 comprise the amino acid sequences of SEQ ID NOs: 403, 412, 422, 433, 435, and 437, respectively.

[0185] In some embodiments, the VH comprises the amino acid sequence of any of SEQ ID NOs: 337-340, or an amino acid sequence having at least 90, 92, 94, 96, 98, or 99% identity thereto, optionally wherein the VH comprises the amino acid sequence of SEQ ID NO: 339, or an amino acid sequence having at least 80, 85, 90, or 95% identity thereto. In some embodiments, the VH comprises an amino acid sequence encoded by the nucleotide sequence of SEQ ID NO: 138, or a nucleotide sequence having at least 80, 85, 90, or 95% identity thereto. In some embodiments, the VL comprises the amino acid sequence of SEQ ID NO: 139 or 342, or an amino acid sequence having at least 90, 92, 94, 96, 98, or 99% identity thereto, optionally wherein the VL comprises the amino acid sequence of SEQ ID NO: 139, or an amino acid sequence having at least 80, 85, 90, or 95% identity thereto. In some embodiments, the VL comprises an amino acid sequence encoded by the nucleotide sequence of SEQ ID NO: 140, or a nucleotide sequence having at least 80, 85, 90, or 95% identity thereto. In some embodiments, the VH and VL comprise the amino acid sequences of: SEQ ID NOs: 339 and 139, respectively, SEQ ID NOs: 337 and 342, respectively, SEQ ID NOs: 338 and 342, respectively, SEQ ID NOs: 339 and 342, respectively, or SEQ ID NOs: 340 and 342, respectively.

[0186] In some embodiments, the multispecific molecule comprises the amino acid sequence of SEQ ID NO: 136, or an amino acid sequence having at least 80, 85, 90, or 95% identity thereto. In some embodiments, the multispecific molecule comprises an amino acid sequence encoded by the nucleotide sequence of SEQ ID NO: 137, or a nucleotide sequence having at least 80, 85, 90, or 95% identity thereto.

[0187] In some embodiments, the anti-CCR2 binding moiety comprises a heavy chain variable region (VH) comprising a heavy chain complementarity determining region 1 (HCDR1), a HCDR2, and a HCDR3, and a light chain variable region (VL) comprising a light chain complementarity determining region 1 (LCDR1), a LCDR2, and a LCDR3, wherein the HCDR1, HCDR2, HCDR3, LCDR1, LCDR2, and LCDR3 comprise the amino acid sequences of SEQ ID NOs: 446, 447, 448, 454, 455, and 456, respectively. In some embodiments, the VH does not comprise the amino acid sequence of SEQ ID NO: 480. In some embodiments, the VL does not comprise the amino acid sequence of SEQ ID NO: 481. In some embodiments, the VH does not comprise the amino acid sequence of SEQ ID NO: 480 and the VL does not comprise the amino acid sequence of SEQ ID NO: 481.

[0188] In some embodiments, the VH comprises the amino acid sequence of SEQ ID NO: 343 or 344, or an amino acid sequence having at least 90, 92, 94, 96, 98, or 99% identity thereto, optionally wherein the VH comprises the amino acid sequence of SEQ ID NO: 343, or an amino acid sequence having at least 90, 92, 94, 96, 98, or 99% identity thereto. In some embodiments, the VH comprises an amino acid sequence encoded by the nucleotide sequence of SEQ ID NO: 133, or a nucleotide sequence having at least 80, 85, 90, or 95% identity thereto. In some embodiments, the VL comprises the amino acid sequence of SEQ ID NO: 345, or an amino acid sequence having at least 90, 92, 94, 96, 98, or 99% identity thereto. In some embodiments, the VL comprises an amino acid sequence encoded by the nucleotide sequence of SEQ ID NO: 272 or a nucleotide sequence having at least 80, 85, 90, or 95% identity thereto. In some embodiments, the VH and VL comprise the amino acid sequences of: SEQ ID NOs: 343 and 345, respectively, or SEQ ID NOs: 344 and 345, respectively.

[0189] In some embodiments, the multispecific molecule comprises the amino acid sequence of the amino acid sequence of SEQ ID NO: 131, or an amino acid sequence having at least 80, 85, 90, or 95% identity thereto. In some embodiments, the multispecific molecule comprises an amino acid sequence encoded by the nucleotide sequence of SEQ ID NO: 132, or a nucleotide sequence having at least 80, 85, 90, or 95% identity thereto. In some embodiments, the multispecific molecule comprises the amino acid sequence of SEQ ID NO: 373, or an amino acid sequence having at least 80, 85, 90, or 95% identity thereto. In some embodiments, the multispecific molecule comprises an amino acid sequence encoded by the nucleotide sequence of SEQ ID NO: 134, or a nucleotide sequence having at least 80, 85, 90, or 95% identity thereto.

[0190] In some embodiments, the multispecific molecule comprises the amino acid sequence of SEQ ID NO: 127, the amino acid sequence of SEQ ID NO: 131, the amino acid sequence of SEQ ID NO: 373. In some embodiments, the multispecific molecule comprises the amino acid sequence of SEQ ID NO: 136, the amino acid sequence of SEQ ID NO: 131, the amino acid sequence of SEQ ID NO: 373.

[0191] In some embodiments, the anti-CSF1R antibody molecule binds to CSF1R monovalently. In some embodiments, the anti-CCR2 antibody molecule binds to CCR2 monovalently. In some embodiments, the multispecific molecule binds to CSF1R monovalently, and binds to CCR2 monovalently. In some embodiments, the multispecific molecule inhibits CSF1R in the presence of CCR2, optionally wherein the multispecific molecule reduces an activity of CSF1R (e.g., CSF1R signaling, e.g., CSF1-induced CSF1R signaling) in a cell, e.g., by at least 40, 50, 60, 70, 80, or 90%, when the cell expresses both CSF1R and CCR2 on the cell surface. In some embodiments, the multispecific molecule does not inhibit or does not substantially inhibit CSF1R in the absence of CCR2, optionally wherein the multispecific molecule does not reduce an activity of CSF1R (e.g., CSF1R signaling, e.g., CSF1-induced CSF1R signaling), or does not reduce an activity of CSF1R by more than 2, 4, 6, 8, 10, or 15%, when the cell expresses CSF1R but not CCR2 on the cell surface.

[0192] In some embodiments, the multispecific molecule inhibits CCR2 in the presence of CSF1R, optionally wherein the multispecific molecule reduces an activity of CCR2 in a cell, e.g., by at least 40, 50, 60, 70, 80, or 90%, when the cell expresses both CCR2 and CSF1R on the cell surface. In some embodiments, the multispecific molecule does not inhibit or does not substantially inhibit CCR2 in the absence of CSF1R, optionally wherein the multispecific molecule does not reduce an activity of CCR2, or does not reduce an activity of CCR2 by more than 2, 4, 6, 8, 10, or 15%, when the cell expresses CCR2 but not CSF1R on the cell surface.

[0193] In some embodiments, the TGF beta inhibitor inhibits TGF-beta 1, TGF-beta 2, TGF-beta 3, both TGF-beta 1 and TGF-beta 3, or TGF-beta 1, TGF-beta 2, and TGF-beta 3, e.g., as measured using the methods described in Example 20 with respect to FIG. 26B. In some embodiments, the TGF beta inhibitor comprises a TGF-beta receptor polypeptide (e.g., an extracellular domain of a TGF-beta receptor, or a functional variant thereof). In some embodiments, the TGF-beta inhibitor comprises one, two, or all of: a TGFBR1 polypeptide (e.g., 1, 2, 3, or more of a TGFBR1 polypeptide), a TGFBR2 polypeptide (e.g., 1, 2, 3, or more of a TGFBR2 polypeptide), or a TGFBR3 polypeptide (e.g., 1, 2, 3, or more of a TGFBR3 polypeptide). In some embodiments, the TGF-beta inhibitor comprises a TGFBR1 polypeptide. In some embodiments, the TGF-beta inhibitor comprises: (i) an extracellular domain of TGFBR1 or a sequence substantially identical thereto (e.g., a sequence that is at least 80%, 85%, 90%, or 95% identical thereto), (ii) an extracellular domain of SEQ ID NO: 95, 96, 97, 120, 121, or 122, or a sequence substantially identical thereto (e.g., a sequence that is at least 80%, 85%, 90%, or 95% identical thereto), or (iii) the amino acid sequence of SEQ ID NO: 104 or 105, or a sequence substantially identical thereto (e.g., a sequence that is at least 80%, 85%, 90%, or 95% identical thereto).

[0194] In some embodiments, the TGF-beta inhibitor comprises a TGFBR2 polypeptide. In some embodiments, the TGF-beta inhibitor comprises: (i) an extracellular domain of TGFBR2 or a sequence substantially identical thereto (e.g., a sequence that is at least 80%, 85%, 90%, or 95% identical thereto), (ii) an extracellular domain of SEQ ID NO: 98, 99, 123, or 124, or a sequence substantially identical thereto (e.g., a sequence that is at least 80%, 85%, 90%, or 95% identical thereto), or (iii) an amino acid sequence selected from the group consisting of SEQ ID NOs: 100, 101, 102, and 103, or a sequence substantially identical thereto (e.g., a sequence that is at least 80%, 85%, 90%, or 95% identical thereto).

[0195] In some embodiments, the TGF-beta inhibitor comprises a TGFBR3 polypeptide. In some embodiments, the TGF-beta inhibitor comprises: (i) an extracellular domain of TGFBR3 or a sequence substantially identical thereto (e.g., a sequence that is at least 80%, 85%, 90%, or 95% identical thereto), (ii) an extracellular domain of SEQ ID NO: 106, 107, 125, or 126, or a sequence substantially identical thereto (e.g., a sequence that is at least 80%, 85%, 90%, or 95% identical thereto), or (iii) the amino acid sequence of SEQ ID NO: 108, or a sequence substantially identical thereto (e.g., a sequence that is at least 80%, 85%, 90%, or 95% identical thereto).

[0196] In some embodiments, the TGF-beta inhibitor comprises two TGF-beta receptor polypeptides that form a homodimer, optionally wherein the TGF-beta inhibitor comprises: (i) two TGFBR1 polypeptides that form a homodimer, (ii) two TGFBR2 polypeptides that form a homodimer, or (iii) two TGFBR3 polypeptides that form a homodimer.

[0197] In some embodiments, the TGF-beta inhibitor comprises two TGF-beta receptor polypeptides that form a heterodimer. In some embodiments, the TGF-beta inhibitor comprises: (i) a TGFBR1 polypeptide and a TGFBR2 polypeptide that form a heterodimer, (ii) a TGFBR1 polypeptide and a TGFBR3 polypeptide that form a heterodimer, or (iii) a TGFBR2 polypeptide and a TGFBR3 polypeptide that form a heterodimer.

[0198] In some embodiments, the TGF-beta inhibitor comprises a first TGF-beta receptor polypeptide and a second TGF-beta receptor polypeptide.

[0199] In some embodiments, the multispecific molecule comprises a first Fc region (e.g., a first CH1-Fc region) and a second Fc region (e.g., a second CH1-Fc region). In some embodiments, (i) the first TGF-beta receptor polypeptide is linked, e.g., via a linker, to the first Fc region (e.g., a first CH1-Fc region), e.g., the C-terminus of the first Fc region (e.g., a first CH1-Fc region), and (ii) the second TGF-beta receptor polypeptide is linked, e.g., via a linker, to the second Fc region (e.g., a second CH1-Fc region), e.g., the C-terminus of the second Fc region (e.g., a second CH1-Fc region). In some embodiments, the first TGF-beta receptor polypeptide and the second TGF-beta receptor polypeptide form a homodimer or heterodimer, e.g., a homodimer. In some embodiments, the first or second TGF-beta receptor polypeptide comprises an extracellular domain of TGFBR1, TGFBR2, or TGFBR3, e.g., an extracellular domain of TGFBR2. In some embodiments, the multispecific molecule has the configuration of FIG. 35A or 35B.

[0200] In some embodiments, the multispecific molecule comprises the amino acid sequence of SEQ ID NO: 192 and the amino acid sequence of SEQ ID NO: 193. In some embodiments, the multispecific molecule comprises the amino acid sequence of SEQ ID NO: 192 and the amino acid sequence of SEQ ID NO: 195. In some embodiments, the multispecific molecule comprises the amino acid sequence of SEQ ID NO: 194 and the amino acid sequence of SEQ ID NO: 193. In some embodiments, the multispecific molecule comprises the amino acid sequence of SEQ ID NO: 194 and the amino acid sequence of SEQ ID NO: 195.

[0201] In some embodiments, the multispecific molecule comprises a heavy chain constant region 1 (CH1) and a light chain constant region (CL). In some embodiments, (i) the first TGF-beta receptor polypeptide is linked, e.g., via a linker, to the CH1, e.g., the N-terminus of the CH1, and (ii) the second TGF-beta receptor polypeptide is linked, e.g., via a linker, to the CL, e.g., the N-terminus of the CL. In some embodiments, the first TGF-beta receptor polypeptide and the second TGF-beta receptor polypeptide form a homodimer or heterodimer, e.g., a homodimer. In some embodiments, the first or second TGF-beta receptor polypeptide comprises an extracellular domain of TGFBR1, TGFBR2, or TGFBR3, e.g., an extracellular domain of TGFBR2. In some embodiments, the multispecific molecule has the configuration of FIG. 35C or 35D.

[0202] In some embodiments, the multispecific molecule comprises the amino acid sequence of SEQ ID NO: 196 and the amino acid sequence of SEQ ID NO: 198. In some embodiments, the multispecific molecule comprises the amino acid sequence of SEQ ID NO: 196 and the amino acid sequence of SEQ ID NO: 199. In some embodiments, the multispecific molecule comprises the amino acid sequence of SEQ ID NO: 197 and the amino acid sequence of SEQ ID NO: 198. In some embodiments, the multispecific molecule comprises the amino acid sequence of SEQ ID NO: 197 and the amino acid sequence of SEQ ID NO: 199.

[0203] In some embodiments, the TGF inhibitor is linked, e.g., via a linker, to the anti-CSF1R binding moiety (e.g., an anti-CSF1R antibody molecule) or the anti-CCR2 binding moiety (e.g., an anti-CCR2 antibody molecule). In some embodiments, the anti-CSF1R binding moiety and/or the anti-CCR2 binding moiety comprises an Fc region, wherein the TGF inhibitor is linked, e.g., via a linker, to the Fc region, e.g., the C-terminus of the Fc region. In some embodiments, the multispecific molecule comprises a first TGF-beta inhibitor and a second TGF-beta inhibitor, wherein the first TGF-beta inhibitor is linked, e.g., via a linker, to the anti-CSF1R binding moiety (e.g., an anti-CSF1R antibody molecule) and the second TGF-beta inhibitor is linked, e.g., via a linker, to the anti-CCR2 binding moiety (e.g., an anti-CCR2 antibody molecule). In some embodiments, the anti-CSF1R binding moiety comprises a first Fc region, the anti-CCR2 binding moiety comprises a second Fc region, and the multispecific molecule comprises a first TGF-beta inhibitor and a second TGF-beta inhibitor, wherein the first TGF-beta inhibitor is linked, e.g., via a linker, to the first Fc region, e.g., the C-terminus of the first Fc region, and the second TGF-beta inhibitor is linked, e.g., via a linker, to the second Fc region, e.g., the C-terminus of the second Fc region.

[0204] In some embodiments, (i) the anti-CSF1R binding moiety comprises a first light chain and a first heavy chain, wherein the first heavy chain comprises a first Fc region, wherein the C-terminus of the first Fc region is linked to an extracellular domain of TGFBR2 or a sequence substantially identical thereto (e.g., a sequence that is at least 80%, 85%, 90%, or 95% identical thereto); and (ii) the anti-CCR2 binding moiety comprises a second light chain and a second heavy chain, wherein the second heavy chain comprises a second Fc region, wherein the C-terminus of the second Fc region is linked to an extracellular domain of TGFBR2 or a sequence substantially identical thereto (e.g., a sequence that is at least 80%, 85%, 90%, or 95% identical thereto). In some embodiments, the multispecific molecule has the configuration shown in FIG. 12B.

[0205] In some embodiments, the multispecific molecule comprises a molecule disclosed in Table 34 or Table 28. In some embodiments, the multispecific molecule has or comprises a configuration shown in any of FIG. 39F or 12A-12J.

[0206] In some embodiments, the multispecific molecule disclosed herein) induces antibody dependent cellular cytotoxicity (ADCC).

[0207] In some embodiments, the multispecific molecule disclosed herein) does not induce antibody dependent cellular cytotoxicity (ADCC).

[0208] In another aspect, provided herein are isolated nucleic acid molecules encoding the multispecific molecule (e.g., antibody) disclosed herein.

[0209] In another aspect, provided herein are isolated nucleic acid molecules, which comprises the nucleotide sequence encoding any of the multispecific molecules described herein, or a nucleotide sequence substantially homologous thereto (e.g., at least 95% to 99.9% identical thereto).

[0210] In another aspect, provided herein are vectors, e.g., expression vectors, comprising one or more of the nucleic acid molecules described herein.

[0211] In another aspect, provided herein are cells, e.g., host cells, comprising the nucleic acid molecule described herein or the vector described herein.

[0212] In another aspect, provided herein are methods of making, e.g., producing, the multispecific molecules described herein, comprising culturing the cell, e.g., the host cell, described herein, under suitable conditions, e.g., conditions suitable for gene expression and/or heterodimerization.

[0213] In another aspect, provided herein are pharmaceutical compositions comprising the multispecific molecule described herein and a pharmaceutically acceptable carrier, excipient, or stabilizer.

[0214] In another aspect, provided herein are methods of treating a hyperproliferative disorder, a cancer, a fibrotic disorder or condition, an inflammatory disorder or condition, or an autoimmune disorder. In one embodiment, the disorder is a hyperproliferative disorder, e.g., a hyperproliferative connective tissue disorder (e.g., a hyperproliferative fibrotic disease). In one embodiment, the fibrotic (e.g., hyperproliferative fibrotic) disease is multisystemic or organ-specific. Exemplary fibrotic diseases include, but are not limited to, multisystemic (e.g., systemic sclerosis, multifocal fibrosclerosis, sclerodermatous graft-versus-host disease in bone marrow transplant recipients, nephrogenic systemic fibrosis, scleroderma), and organ-specific disorders (e.g., fibrosis of the lung, liver, heart, kidney, pancreas, skin and other organs). In other embodiments, the fibrotic disease is chosen from liver fibrosis (e.g., liver cirrhosis, NASH, and other conditions described herein), pulmonary fibrosis (e.g., IPF), renal fibrosis, or fibrosis of the bone marrow (e.g., myelofibrosis).

[0215] In another aspect, provided herein are methods of treating a cancer in a subject, comprising administering to the subject in need thereof the multispecific molecule described herein, wherein the multispecific molecule is administered in an amount effective to treat the cancer.

[0216] In some embodiments, the cancer is a solid tumor cancer or a metastatic lesion. In some embodiments, the solid tumor cancer is one or more of pancreatic cancer (e.g., pancreatic adenocarcinoma), breast cancer, colorectal cancer, lung cancer (e.g., small or non-small cell lung cancer), skin cancer (e.g., melanoma), ovarian cancer, liver cancer, brain cancer (e.g., glioma), bladder cancer, cervix cancer, head and neck cancer, kidney cancer, mesothelium cancer, thyroid cancer, or uterus cancer.

[0217] In some embodiments, the methods further comprise administering a second therapeutic treatment. In some embodiments, the second therapeutic treatment comprises a therapeutic agent (e.g., a chemotherapeutic agent, a biologic agent, hormonal therapy), radiation, or surgery. In some embodiments, the therapeutic agent is selected from: a chemotherapeutic agent, or a biologic agent. In some embodiments, the therapeutic agent is a checkpoint inhibitor. In some embodiments, the check point inhibitor is selected from the group consisting of an anti-CTLA4 antibody, an anti-PD1 antibody (e.g., Nivolumab, Pembrolizumab or Pidilizumab), an anti-PD-L1 antibody, an anti-PD-L2 antibody, an anti-TIM3 antibody, an anti-LAG3 antibody, an anti-CD160 antibody, an anti-2B4 antibody, an anti-CD80 antibody, an anti-CD86 antibody, an anti-B7-H3 (CD276) antibody, an anti-B7-H4 (VTCN1) antibody, an anti-HVEM (TNFRSF14 or CD270) antibody, an anti-BTLA antibody, an anti-KIR antibody, an anti-MHC class I antibody, an anti-MHC class II antibody, an anti-GAL9 antibody, an anti-VISTA antibody, an anti-BTLA antibody, an anti-TIGIT antibody, an anti-LAIR1 antibody, and an anti-A2aR antibody. In some embodiments, the check point inhibitor is an anti-PD1 antibody.

[0218] In one aspect, provided herein are methods of treating a cancer in a subject, comprising administering to the subject in need thereof an effective amount of a multispecific molecule described herein (e.g., the anti-CSF1R/anti-CCR2 multispecific molecule described herein) in combination with an anti-PD1 antibody.

[0219] In one aspect, the invention pertains to the multispecific molecule of the invention, the antibody molecule of the invention, the nucleic acid molecule of the invention, the vector of the invention, the cell of the invention, or the pharmaceutical composition of the invention for use as a medicament.

[0220] In one aspect, the invention pertains to the multispecific molecule of the invention, the antibody molecule of the invention, the nucleic acid molecule of the invention, the vector of the invention, the cell of the invention, or the pharmaceutical composition of the invention for use as a medicament in the treatment of cancer.

[0221] In one aspect, provided herein are methods of treating a fibrotic disease or disorder in a subject in need thereof, comprising administering to the subject an effective amount of a multispecific molecule disclosed herein, thereby treating the fibrotic disease or disorder. In some embodiments, the fibrotic disease or disorder is a fibrotic disease or disorder of the lung, the liver, the heart or vasculature, the kidney, the pancreas, the skin, the gastrointestinal tract, the bone marrow or a hematopoietic tissue, the nervous system, the eye, or a combination thereof. In some embodiments, the fibrotic disease or disorder is lung fibrosis (e.g., Idiopathic pulmonary fibrosis (IPF)) or liver fibrosis (e.g., Nonalcoholic steatohepatitis (NASH)).

[0222] In some embodiments, treatment of a fibrotic condition includes reducing or inhibiting one or more of: formation or deposition of tissue fibrosis; reducing the size, cellularity (e.g., fibroblast or immune cell numbers), composition; or cellular content, of a fibrotic lesion; reducing the collagen or hydroxyproline content, of a fibrotic lesion; reducing expression or activity of a fibrogenic protein; reducing fibrosis associated with an inflammatory response; decreasing weight loss associated with fibrosis; or increasing survival.

[0223] In some embodiments, the fibrotic disease or disorder is primary fibrosis. In one embodiment, the fibrotic disease or disorder is idiopathic. In other embodiments, the fibrotic disease or disorder is associated with (e.g., is secondary to) a disease (e.g., an infectious disease, an inflammatory disease, an autoimmune disease, a malignant or cancerous disease, and/or a connective disease); a toxin; an insult (e.g., an environmental hazard (e.g., asbestos, coal dust, polycyclic aromatic hydrocarbons), cigarette smoking, a wound); a medical treatment (e.g., surgical incision, chemotherapy or radiation), or a combination thereof.

[0224] In one aspect, provided herein are methods of treating a liver disease or disorder in a subject in need thereof, comprising administering to the subject an effective amount of a multispecific molecule disclosed herein, thereby treating the liver disease or disorder. In some embodiments, the liver disease or disorder is a fibrotic disorder or connective tissue disorder affecting the function or physiology of the liver. In one embodiment, the fibrotic disorder or connective tissue disorder can be systemic (affecting the whole body), multi-organ, or organ-specific (e.g., liver-specific). Examples of fibrotic liver disorders include, but are not limited to, liver fibrosis (hepatic fibrosis), liver cirrhosis, and any disorder associated with accumulation of extracellular matrix proteins, e.g., collagen, in the liver, liver scarring, and/or abnormal hepatic vasculature. In one embodiment, the liver disease or disorder is liver cirrhosis. Liver cirrhosis is considered to be an end stage of liver fibrosis, involving regenerative nodules (as a result of repair processes), and is typically accompanied with the distortion of the hepatic vasculature. In other embodiments, the liver disease or disorder is a liver cancer. Examples of liver cancers include, but are not limited to, hepatocellular carcinoma (HCC), primary liver cell carcinoma, hepatoma, fibrolamellar carcinoma, focal nodular hyperplasia, cholangiosarcoma, intrahepatic bile duct cancer, angiosarcoma or hemangiosarcoma, hepatic adenoma, hepatic hemangiomas, hepatic hamartoma, hepatoblastoma, infantile hemangioendothelialoma, mixed tumors of the liver, tumors of mesenchymal tissue, and sarcoma of the liver. Liver cancers can also be associated with metastasis of non-liver cancers, such as breast cancer, colorectal cancer, esophageal cancer, kidney or renal cancer, lung cancer, ovarian cancer, pancreatic cancer, rectal cancer, skin cancer (e.g., melanoma), gastric or stomach cancer (including gastrointestinal cancer), and uterine cancer. In one embodiment, the liver disease or disorder is HCC. In certain embodiments, the liver disease or disorder is caused by one or more insults including, but not limited to, liver inflammation or damage; viral (e.g., chronic viral) infection (e.g., hepatitis B, hepatitis C virus, hepatitis A virus, hepatitis D virus (hepatitis delta virus), hepatitis E virus, Epstein-Barr adenovirus, or cytomegalovirus; or parasitic infection, such as schistosomiasis); alcoholism; fatty liver disease; metabolic disorders (e.g., hemachromatosis, diabetes, obesity, hypertension, dyslipidemia, galactosemia, or glycogen storage disease); autoimmune disorders (e.g., autoimmune hepatitis (AIH), autoimmune liver disease, lupoid hepatitis, systemic lupus erythematosus, primary biliary cirrhosis (PBC), scleroderma, or systemic scerlosis); inflammatory liver disorders (e.g., steatohepatitis, primary sclerosing cholangitis (PSC), ulcerative colitis, Crohn's disease, inflammatory bowel disease); inherited or congenital liver disease (e.g., Wilson's disease, Gilbert's disease, Byler syndrome, Greenland-Eskimo familial cholestasis, Zellweger's syndrome, Alagilles syndrome (ALGS), progressive familial intrahepatic cholestasis (PFIC), alpha 1-antitrypsin deficiency, cystic fibrosis, Indian childhood cirrhosis, or hereditary hemochromatosis); and liver injury (e.g., drug toxicity, alcoholism, ischemia, malnutrition, or physical trauma). In one embodiment, the liver disease or disorder is fatty liver (or FLD), alcoholic liver disease, non-alcoholic fatty liver disease (NAFLD), non-alcoholic steatohepatitis (NASH), alcoholic steatohepatitis, simple steatosis, Reye's syndrome, and any disorder associated with abnormal retention of lipids in liver cells.

[0225] In one aspect, provided herein are methods of treating an inflammatory disorder or condition in a subject in need thereof, comprising administering to the subject an effective amount of a multispecific molecule disclosed herein, thereby treating the inflammatory disorder or condition. In one embodiment, the inflammatory disorder or condition is an inflammatory disorder or condition in the kidney. In one embodiment, the inflammatory disorder or condition is Lupus nephritis.

[0226] Unless otherwise defined, all technical and scientific terms used herein have the same meaning as commonly understood by one of ordinary skill in the art to which this invention belongs. Although methods and materials similar or equivalent to those described herein can be used in the practice or testing of the present invention, suitable methods and materials are described below. All publications, patent applications, patents, and other references mentioned herein are incorporated by reference in their entirety. In the case of conflict, the present specification, including definitions, will control. In addition, the materials, methods, and examples are illustrative only and are not intended to be limiting.

[0227] Other features and advantages of the invention will be apparent from the following detailed description and claims.

### BRIEF DESCRIPTION OF THE DRAWINGS

[0228] The patent or application file contains at least one drawing executed in color. Copies of this patent or patent application publication with color drawing(s) will be provided by the Office upon request and payment of the necessary fee.

[0229] FIG. 1. In vitro binding of increasing concentrations of UniTI-01 to transiently transfected ExpiCHO cells expressing mCCR2 (circles), mCSF1R (squares), or both mCCR2 and mCSF1R (triangles), as determined by flow analysis. In FIG. 1, percent fluorescence (%) is plotted against antibody concentrations tested.

[0230] FIG. 2. Effect of increasing concentrations of isotype control (mIgG2a), anti-mouse CCR2 monoclonal antibody (aCCR2) or UniTI-01 on MCP-1-dependent cell migration of bone marrow-derived monocytes in a trans-well cell culture system.

[0231] FIGS. 3A and 3B. Effect of increasing concentrations of UniTI-01, anti-mouse CSF1R monoclonal antibody (aCSF1R), or isotype control (mIgG2a) on mCSF-1-dependent differentiation and proliferation of bone marrow-derived monocytes into macrophages in vitro. FIG. 3A is a pair of flow cytometry plots showing the staining of bone marrow cells with an anti-CCR2 antibody and an anti-CSF1R antibody at day 0 or day 4 of cell culture in the presence of mCSF1. In FIG. 3B, % proliferation is plotted for each condition tested. All antibodies were tested at 15 μg/ml.

[0232] FIG. 4. Effect of UniTI-01, anti-mouse CSF1R monoclonal antibody (aCSF1R), or isotype control (mIgG2a) on mCSF-1-dependent differentiation and proliferation of bone marrow-derived monocytes. All antibodies were tested at 15 μg/ml.

[0233] FIG. 5. In vitro binding of increasing concentrations of UniTI-01 to primary intratumoral M-MDSCs and M2-like macrophages, as determined by flow analysis. FIG. 5 is a panel of histograms showing staining of CD206+ macrophages, M-MDSCs, neutrophils, or CD3+ T cells using UniTI-01.

[0234] FIG. 6. Effect of in vivo administration of UniTI-01 on intratumoral myeloid cell populations in EMT6 and MC38 syngeneic tumor models.

[0235] FIGS. 7A-7D. Effect of in vivo administration of UniTI-01 on Kupffer cells in EMT6 syngeneic tumor model. FIGS. 7A and 7B are immunohistochemistry graphs of tumor and liver tissues, respectively, stained with the antibody F4/80. FIGS. 7C and 7D are graphs showing % F4/80 positive area for tumor and liver tissues, respectively.

[0236] FIGS. 7E-7H. Effect of in vivo administration of UniTI-01 on healthy tissue macrophages in small intestine and kidney. FIGS. 7E and 7G are immunohistochemistry graphs of small intestine and kidney, respectively, stained with the antibody F4/80. FIGS. 7F and 7H are graphs showing % F4/80 positive area for small intestine and kidney, respectively.

[0237] FIGS. 8A and 8B. Effect of UniTI-01 on CSF-1 dependent cell survival in CCR2-negative NFS-60 cells in vitro. In FIG. 8A, cell viability is plotted against the antibody concentrations tested for the anti-CCR2/anti-CSF1R bispecific antibody UniTI-01, a bivalent monospecific anti-CSF1R antibody (aCSF1R), or a monovalent monospecific anti-CSF1R antibody (mono-aCSF1R). FIG. 8B is a pair of flow cytometry plots showing the staining of NFS-60 cells with an anti-CCR2 antibody and an anti-CSF1R antibody, or the staining of NFS-60 cells with an isotype control antibody.

[0238] FIG. 9. Effect of in vivo administration of UniTI-01 on CD8+ T cell infiltration in the tumor of EMT6 model. FIG. 9 is a graph showing % CD8+ T cells in CD3+ T cells in tumors under indicated treatments.

[0239] FIGS. 10A and 10B. Effect of in vivo administration of UniTI-01 on Treg frequency in the tumor of MC38 model. FIG. 10A is a graph showing % FOXP3+ cells in CD4+ T cells in tumors under indicated treatments. In FIG. 10B, the CD8+ T cell/Treg ratio in tumors is plotted for each treatment.

[0240] FIGS. 11A, 11B, and 11C. FIGS. 11A and 11B: UniTI-01 shows antitumor efficacy, tumor regressions and enhanced survival when treated in combination with anti-PDL1 antibody in EMT6 tumor model. FIG. 11A is a panel of graphs showing tumor volumes for each treatment. FIG. 11B is a graph showing percent survival under indicated treatments. FIG. 11C: UniTI-01 shows superior anti-PDL1 combination benefit over anti-CSF1R antibody in MC38 colon model. FIG. 11C is a panel of graphs showing tumor volume for each treatment.

[0241] FIGS. 12A-12J. FIG. 12A shows an exemplary configuration of anti-CSF1R/anti-CCR2 bispecific antibody. In one embodiment, the anti-CSF1R/anti-CCR2 bispecific antibody comprises an anti-CSF1R binding moiety and an anti-CCR2 binding moiety. In one embodiment, the anti-CSF1R binding moiety comprises a heavy chain and a kappa light chain, and the anti-CCR2 binding moiety comprises a heavy chain and a lambda light chain. In one embodiment, the anti-CSF1R binding moiety comprises a heavy chain and a lambda light chain, and the anti-CCR2 binding moiety comprises a heavy chain and a kappa light chain. FIG. 12B shows an exemplary configuration of anti-CSF1R/anti-CCR2 bispecific antibody fused to TGFβ Trap. In one embodiment, the TGFβ Trap comprises a homodimer of two extracellular domains of TGFβ receptor 2. FIGS. 12C and 12D show exemplary configurations of anti-CSF1R/anti-CCR2 bispecific antibody fused to an anti-PDL1 binding moiety. In one embodiment, the anti-PDL1 binding moiety is an scFv. FIGS. 12E-12G show exemplary configurations of anti-CSF1R/anti-CCR2 bispecific antibody fused to one or more IL-2 molecules. In one embodiment, the one or more IL-2 molecules are fused to the C-terminus of the light chain of the anti-CSF1R binding moiety or the anti-CCR2 binding moiety. FIG. 12H shows an exemplary configuration of anti-CSF1R/anti-CCR2 bispecific antibody. In one embodiment, the anti-CSF1R/anti-CCR2 bispecific antibody comprises an anti-CSF1R binding moiety and an anti-CCR2 binding moiety. In one embodiment, the anti-CSF1R binding moiety comprises an anti-CSF1R scFv fused to an Fc. In one embodiment, the anti-CCR2 binding moiety comprises an anti-CCR2 Fab fused to an Fc. FIG. 12I shows an exemplary configuration of anti-CSF1R/anti-CCR2 bispecific antibody, additional comprising TGFβ Trap. In one embodiment, the anti-CSF1R/anti-CCR2 bispecific antibody comprises an anti-CSF1R binding moiety and an anti-CCR2 binding moiety. In one embodiment, the anti-CCR2 binding moiety comprises an anti-CCR2 Fab fused to an Fc. In one embodiment, the anti-CSF1R binding moiety comprises an anti-CSF1R scFv fused to the C-terminus of the Fc of the anti-CCR2 binding moiety. In one embodiment, the TGFβ Trap comprises a first TGFBR2 ECD fused to CH1 and Fc, and a second TGFBR2 ECD fused to CL. FIG. 12J shows an exemplary configuration of anti-CSF1R/anti-CCR2 bispecific antibody fused to TGFβ Trap. In one embodiment, the anti-CSF1R/anti-CCR2 bispecific antibody comprises an anti-CSF1R binding moiety and an anti-CCR2 binding moiety. In one embodiment, the anti-CSF1R binding moiety comprises an anti-CSF1R scFv fused to an Fc. In one embodiment, the anti-CCR2 binding moiety comprises an anti-CCR2 Fab fused to an Fc. In one embodiment, the TGFβ Trap comprises a first TGFBR2 ECD fused to the C-terminus of the Fc of the anti-CCR2 binding moiety, and a second TGFBR2 ECD fused to the C-terminus of the Fc of the anti-CSF1R binding moiety.

[0242] FIG. 13. FIG. 13 is a schematic showing that anti-CSF1R/anti-CCR2 antibody molecule may reduce immunosuppressive myeloid cells and increase infiltration of cytotoxic T cells in the tumor.

[0243] FIG. 14. FIG. 14 is a panel of graphs showing that UniTI-01 spares CSF1R-expressing osteoclasts when compared with anti-CSF1R treatment.

[0244] FIGS. 15A and 15B. FIG. 15A is a panel of graphs showing #M-MDSC per mg tumor in mice bearing EMT6, MC38, or LLC1 tumors. FIG. 15B is a panel of graphs showing #TAM per mg tumor in mice bearing EMT6, MC38, or LLC1 tumors.

[0245] FIG. 16. FIG. 16 is a panel of graphs showing immunohistochemistry staining of tissues using an anti-rat IgG antibody and an anti-F4/80 antibody.

[0246] FIG. 17. FIG. 17 is a bar graph showing biodistribution of UniTI-01 in spleen, brain, lung, heart, colon, kidney, bone, muscle, or tumor at the indicated time points after injection.

[0247] FIG. 18. FIG. 18 is a panel of flow cytometry plots showing staining of tumor M-MDSCs or tumor G-MDSCs using an anti-CSF1R antibody and an anti-CCR2 antibody.

[0248] FIGS. 19A and 19B. FIG. 19A is a panel of graphs showing immunochemistry staining of tumor tissues using an anti-CSF1R bivalent monospecific antibody, an anti-CCR2 bivalent monospecific antibody, or UniTI-01. FIG. 19B is a graph showing % CD3 Positive Area under each condition tested.

[0249] FIG. 20. FIG. 20 is a panel of graphs showing % CD8 positive area, % FoxP3 positive area, or CD8/Treg ratio under each condition tested.

[0250] FIG. 21. FIG. 21 is a graph comparing the property of anti-CCR2 bivalent monospecific antibody, anti-CSF1R bivalent monospecific antibody, and UniTI-01, based on in vivo studies using EMT6, MC38 and LLC1 syngeneic tumor models.

[0251] FIGS. 22A and 22B. UniTI-01 drives tumor regression and depletes suppressive myeloid cells. FIG. 22A is a pair of graphs showing % M-MDSC of CD45+ cells (upper panel) or % TAM of CD45+ cells (lower panel) under each condition tested. FIG. 22B is a panel of graphs showing tumor volume of mice bearing EMT6 breast tumor under each condition tested. Similar results were observed with mice bearing CT26 and MC38 colon tumors.

[0252] FIG. 23. Durable responses and immune memory with UniTI-01/aPD-L1 combination. FIG. 23, left panel, is a pair of graphs showing tumor volume of mice bearing EMT or CT26 tumor. FIG. 23, right panel, is a pair of graphs showing tumor volume of mice re-challenged with both EMT and CT26 tumor cells.

[0253] FIGS. 24A, 24B, and 24C. UniTI-01 inhibits tumor growth in additional mouse syngeneic cancer models. FIGS. 24A, 24B, and 24C are a panel of graphs showing tumor volume of mice bearing MC38, CT26, or EMT6 tumors under each condition tested.

[0254] FIG. 25. FIG. 25 is a schematic showing that UniTI-102 reduces immunosuppressive myeloid cells and neutralizes TGFβ.

[0255] FIGS. 26A and 26B. FIG. 26A is a schematic showing the configuration of UniTI-102. FIG. 26B is a graph showing the level of TGFβ/Smad activation under each condition tested.

[0256] FIGS. 27A, 27B, and 27C. UniTI-102 shows strong monotherapy response in EMT6 tumor model and is not enhanced with the addition of anti-PD-L1. FIGS. 27A-27C are a panel of graphs showing tumor volume of mice bearing EMT6 tumor under each condition tested.

[0257] FIG. 28 is a pair of SDS gels of anti-CSF1R antibodies.

[0258] FIGS. 29A and 29B are a pair of graphs showing binding of anti-human CSF1R antibodies to human and cyno CSF1R-Fc ECD, as measured by ELISA.

[0259] FIG. 30 is a graph showing the level of MCP-1 secretion by monocytes in the presence of various monovalent anti-CSF1R antibodies. Data shown is a representative of 1 of 2 human donors.

[0260] FIG. 31 is a graph showing binding of monovalent anti-CSF1R antibodies to cells expressing CSF1R, as measured by flow cytometry.

[0261] FIG. 32 is a pair of SDS gels of exemplary CCR2×CSF1R bispecific antibodies.

[0262] FIG. 33 is a graph showing that CCR2×CSF1R bispecific antibodies block CCL2-dependent reporter activity in Tango CCR2-bla U2OS cells.

[0263] FIG. 34 is a graph showing that CCR2×CSF1R bispecific antibodies block hCSF1-mediated CCL2 (MCP-1) secretion in purified human monocytes. Data shown is a representative of 1 of 2 human donors.

[0264] FIGS. 35A-35D are schematics showing exemplary multispecific molecules comprising a TGFβ inhibitor. In some embodiments, the TGFβ inhibitor comprises a TGF-beta receptor ECD homodimer. In some embodiments, the TGFβ inhibitor comprises a TGFBR2 ECD heterodimer. In FIGS. 35A and 35B, the two TGFBR ECD domains are linked to the C-terminus of two Fc regions. In some embodiments, the CH1-Fc-TGFBR ECD region shown in FIG. 35A or 35B comprises the amino acid sequence of SEQ ID NO: 192 or 193. In some embodiments, the Fc-TGFBR ECD region shown in FIG. 35A or 35B comprises the amino acid sequence of SEQ ID NO: 194 or 195. In FIGS. 35C and 35D, the two TGFBR ECD domains are linked to CH1 and CL, respectively. In some embodiments, the TGFBR ECD-CH1-Fc region shown in FIG. 35C or 35D comprises the amino acid sequence of SEQ ID NO: 196 or 197. In some embodiments, the TGFBR ECD-CL region shown in FIG. 35C or 35D comprises the amino acid sequence of SEQ ID NO: 198 or 199. In some embodiments, the multispecific molecule comprises binding a moiety A and a binding moiety B. In some embodiments, the binding moiety A or binding moiety B is an anti-CSF1R binding moiety (e.g., an anti-CSF1R antibody molecule). In some embodiments, the binding moiety A or binding moiety B is an anti-CCR2 binding moiety (e.g., an anti-CCR2 antibody molecule). In some embodiments, the binding moiety A is an anti-CSF1R binding moiety (e.g., an anti-CSF1R antibody molecule) and the binding moiety B is an anti-CCR2 binding moiety (e.g., an anti-CCR2 antibody molecule). In some embodiments, the binding moiety A is an anti-CCR2 binding moiety (e.g., an anti-CCR2 antibody molecule) and the binding moiety B is an anti-CSF1R binding moiety (e.g., an anti-CSF1R antibody molecule).

[0265] FIG. 36 is a graph in which TGFβ/Smad activation is plotted against TGFβ-trap concentrations. Constructs tested in this study included: Single TGFβ Fab-trap, Anti-PDL1×TGFβ-trap, UniTI-01 (Anti-CCR2×anti-CSF1R), and UniTI-102 (Anti-CCR2×anti-CSF1R×TGFβ-trap).

[0266] FIG. 37. CSF1R and CCR2 co-expression on monocytic myeloid-derived suppressor cells (Mo-MDSCs) and tumor-associated macrophages (TAMs) from cancer patients. FIG. 37 includes a panel of flow cytometry plots showing staining of mo-MDSCs or TAMs from ovarian tumors (upper panel) or colorectal tumors (lower panel) using an anti-CSF1R antibody and an anti-CCR2 antibody. FIG. 37 also includes bar graphs showing % CCR2+ CSF1R+ cells among M-MDSCs, TAMs, granulocytic myeloid-derived suppressor cells (G-MDSCs), CD4+ T cells, CD8+ T cells, monocytes, or non-immune cells from ovarian tumors (upper panel) or colorectal tumors (lower panel). CSF1R and CCR2 co-expression was also detected on CD163+ TAMs.

[0267] FIGS. 38A-38D. Therapeutic concept demonstrated with mouse surrogate mUniTI-102 in a syngeneic tumor model resistant to PD1 or TGFβ blockade therapy. FIG. 38A is a graph showing that mUniTI-102 depletes mo-MDSCs in EMT6 breast tumors. FIG. 38B is a graph showing that mUniTI-102 preferentially depletes TAMs over tissue-resident macrophages. FIG. 38C is a graph showing that mUniTI-102 demonstrates monotherapy anti-tumor activity in the EMT6 breast tumor model. FIG. 38D is a graph showing that mUniTI-102 enhances survival in EMT6 tumor-bearing mice.

[0268] FIGS. 39A-39F. Human UniTI-102 preferentially binds to primary human classical monocytes in whole blood. FIG. 39A is a cartoon showing CCR2 and CSF1R co-expression on a classical monocyte. FIG. 39B is a graph showing normalized frequency of UniTI-102+ cells among classical monocytes at the indicated concentrations of BIM0648 (“648”), BIM0652 (“052”), or an isotype control antibody (“iso”). FIG. 39C is a cartoon showing CSF1R expression on a non-classical monocyte. FIG. 39D is a graph showing normalized frequency of UniTI-102+ cells among non-classical monocytes (CD14-CD16+) at the indicated concentrations of BIM0648 (“648”), BIM0652 (“052”), or an isotype control antibody (“iso”). FIG. 39E is a table showing receptor density of CCR2 and CSF1R on different types of monocytes. FIG. 39F shows the configuration of UniTI-102 molecules BIM0648 and BIM0652.

[0269] FIGS. 40A-40F. TGFβ neutralization by human UniTI-102 molecules confirmed by various functional assays in vitro. In FIG. 40A, TGFβ/Smad activation is plotted against concentrations of BIM0648, BIM0652, and a human IgG1. FIG. 40B is a graph showing % FOXP3+CD25+ of CD4+ T cells for the following treatment groups: with TGFβ but without any constructs (+TGFb), without TGFβ (No TGFb), UniTI-102 molecule BIM0648, anti-PD-L1-TGFBR2, and human IgG1. FIG. 40C is a graph showing specific killing for the following treatment groups: with TGFβ but without any constructs (+TGFb), without TGFβ (No TGFb), UniTI-102 molecule BIM0648, anti-PD-L1-TGFBR2, and human IgG1. FIG. 40D is a graph showing the amount of TGFb1, TGFb2, TGFb3, IL-10, IL-4, and IL-6 secreted by SW840 cells. FIGS. 40E and 40F are graphs showing the expression of CD206 (a M2 marker) and HLA (a M1 marker), respectively, in each treatment group. Data is representative of 2 donors. Comparable results were observed for BIM0652.

[0270] FIGS. 41A and 41B. Pharmacokinetic data for BIM0648 in healthy cynomolgus monkeys. FIG. 41A is a graph showing the concentration of BIM0648 at the indicated time points after administration into healthy cynomolgus monkeys at 0.1 mg/kg, 1 mg/kg, 10 mg/kg, or 30 mg/kg. FIG. 41B is a table summarizing pharmacokinetic data for BIM0648.

[0271] FIG. 42. Evidence of target occupancy for BIM0648 in cynomolgus monkeys. FIG. 42 is a panel of graphs showing serum levels of TGFβ1 (left), M-CSF (middle), and MCP-1 (right) in cynomolgus monkeys after administration of BIM0648 at 0.1 mg/kg, 1 mg/kg, 10 mg/kg, or 30 mg/kg.

[0272] FIGS. 43A-43D. Trend of biological response noted for BIM0648, consistent with CSF1R blockade in monkey and human. FIGS. 43A-43D are a panel of graphs showing non-classical monocytes (% total monocytes) in cynomolgus monkeys at the indicated time points after administration of BIM0648 at 0.1 mg/kg (FIG. 43A), 1 mg/kg (FIG. 43B), 10 mg/kg (FIG. 43C), or 30 mg/kg (FIG. 43D).

[0273] FIG. 44. Murine CCR2×CSF1R bispecific molecule (mUniTI-01) is more effective in depleting circulating Mo-MDSCs in EMT6 tumor-bearing mice compared to anti-CSF1R mAb. FIG. 44 is a bar graph showing % M-MDSC in EMT6 tumor-bearing mice after administration of mUniTI-01 or an anti-CSF1R antibody (“CSF1R”) in combination with an anti-PDL1 antibody.

[0274] FIGS. 45A and 45B. mUniTI-102 efficiently binds to blood Ly6C^{hi} monocytes in EMT6 syngeneic tumor model. FIG. 45A includes flow cytometry histograms showing the binding of mUniTI-102 to Ly6C^{hi} classical monocytes. FIG. 45B is a graph showing % TGFβRII+Ly6C^{hi} monocytes as detected using an anti-human TGFβRII antibody.

[0275] FIGS. 46A and 46B. mUniTI-102 depletes blood Ly6C^{hi} classical monocytes in EMT6 syngeneic tumor model. FIGS. 46A and 46B are graphs showing % Ly6C^{hi} monocytes of single cells and % Ly6C^{lo} monocytes of single cells, respectively, in EMT6 tumor-bearing mice after administration of four doses of mUniTI-102. Administration of mUniTI-102 led to dose-dependent depletion of Ly6C^{hi} classical monocytes in blood while sparing Ly6C^{lo} non-classical monocytes, which are CCR2 negative. Minimal changes were noted in whole blood % CD3+, Treg or CD4/CD8 ratios.

[0276] FIGS. 47A and 47B. mUniTI-102 decreases serum TGFβ-1 levels in EMT6 syngeneic tumor model. FIG. 47A is a diagram showing the design of an in vivo study testing mUniTI-102 in a EMT6 syngeneic tumor model. FIG. 47B is a bar graph showing TGF-β1 levels in acid treated serum samples as measured by ELISA. Similar reduction was also observed in a CT26 model.

[0277] FIG. 48 is a table showing human and cynomolgus whole blood receptor density for CCR2 and CSF1R. There is higher CSF1R expression on non-classical monocytes in cynomolgus compared to human. Consistent with this expression pattern, unlike human whole blood, significant binding was present to non-classical monocyte populations in cynomolgus monkey whole blood. No significant differences were observed in binding between BIM0648 and BIM0652 to monocyte populations in cynomolgus monkey whole blood.

[0278] FIGS. 49A-49F. UniTI-102 (BIM0648) exhibits excellent manufacturability properties. FIG. 49A summarizes product information for BIM0648. FIG. 49B is a graph showing results from a study testing the stability of BIM0648 in PBS at 40° C. on Day 0, Day 10, and Day 30. FIG. 49C is a graph showing high colloidal stability and low aggregation propensity of BIM0648. FIG. 49D is a graph showing results from a study testing the thermal stability of BIM0648. FIG. 49E is a graph showing results from a study testing the propensity of BIM0648 to self-aggregate. FIG. 49F is a graph showing results from a study testing the stability of BIM0648 at pH 3.5.

[0279] FIG. 50. UniTI-102 (BIM0648) shows retained binding to Fc receptors. FIG. 50 is a graph showing binding of BIM0648 to Fc receptors as assessed using Biacore.

[0280] FIG. 51. UniTI-102 (BIM0648) shows negligible non-specific binding propensity. FIG. 51 is a bar graph showing results from a study testing non-specific binding of BIM0648. Poly-reactivity was assessed by checking binding to baculovirus particles. hIgG1, bevacizumab and pembrolizumab were used as benchmarks.

[0281] FIGS. 52A-52D are a panel of graphs showing binding of BIM0648 to M1 macrophages, MDSCs, TAMs, and M2 macrophages. BHM1650, a bivalent anti-CSF1R antibody, was used as a control. In vitro differentiated monocyte-derived M1 macrophages have lowest expression of CSF1R and CCR2. TAMs and M2 macrophages have the highest expression. MDSCs have intermediate CSF1R expression and similar CCR2 expression levels as M1 macrophages. Engagement of BIM0648 correlates with CCR2/CSF1R expression—highest in TAMs and M2 macrophages, intermediate in MDCSs, and no binding in M1 macrophages.

[0282] FIGS. 53A and 53B are graphs showing % binding of IgG, BIM0648, and BHM1650 (a bivalent anti-CSF1R antibody) to classical monocytes (FIG. 53A) or non-classical monocytes (FIG. 53B). BIM0648 binds to classical monocytes with greater affinity than to non-classical monocytes in PBMCs.

[0283] FIGS. 54A-54C are graphs showing results from an anti-CSF1R function assay: human monocyte survival assay. FIGS. 54A and 54B are graphs showing results from BIM0648, BIM0652, BHM1650 (a bivalent anti-CSF1R antibody), human IgG1, no cytokine group, and CSF1 only group. FIG. 54C is a table showing inhibition of human monocyte survival/proliferation/IC50 (nM) for BIM0648, BIM0652, and BHM1650.

[0284] FIGS. 55A-55B are graphs showing results from an anti-CCR2 function assay: human monocytic cell migration assay. FIG. 55A is a graph showing cell count (migration) against antibody concentrations of BIM0648, BIM0652, BHM0139 (a bivalent anti-CCR2 antibody), human IgG1, no rhCCL2 group, and rhCCL2 alone group. FIG. 55B is a table showing IC50 (nM) of BIM0648, BIM0652 and BHM0139 for inhibiting THP-1 migration.

[0285] FIGS. 56A and 56B are graphs showing results from a TGFβ trap function assay: a reporter cell assay. FIG. 56A is a graph showing TGFβ-induced Smad activation for BIM0648, BIM0652, BHM1603 (a bivalent anti-PDL1 antibody fused to TGFβ tap at the C-terminus of the Fc region), human IgG1, cells-only group, and cells+human TGFβ1 group. FIG. 56B is a table showing the IC50 (nM) of BIM0648, BIM0652, and BHM1603 for inhibiting TGFβ-induced Smad signal.

[0286] FIG. 57 is a graph showing results from a TGFβ trap function assay: human Treg differentiation assay. FIG. 57 includes a panel of flow cytometry plots showing the staining of CD25 and Foxp3. The antibodies tested in the human Treg differentiation assay include: BIM0648, BHM1603 (a bivalent anti-PDL1 antibody fused to TGFβ tap at the C-terminus of the Fc region), BHM1583 (a C-terminal Fc fusion of TGFβRII trap), and human IgG1 isotype antibody.

[0287] FIG. 58. UniTI-102 (BIM0648) can effectively inhibit human Treg differentiation in vitro. FIG. 58 is a graph showing % FOXP3+CD25+ cells of CD4+ T cells for the following treatment groups: with TGFβ and without constructs (“+TGFb”), no TGFβ, UniTI-102 (BIM0648), BHM1603 (a bivalent anti-PDL1 antibody fused to TGFβ tap at the C-terminus of the Fc region), BHM1583 (a C-terminal Fc fusion of TGFβRII trap), and human IgG1.

[0288] FIG. 59 is a graph illustrating a TGFβ trap function assay: a human NK cell killing assay.

[0289] FIGS. 60A-60C. UniTI-102 (BIM0648) reverses suppressive effect of TGFβ on primary human NK cell killing. FIG. 60A is a panel of flow cytometry plots showing results from the human NK cell killing assay. FIGS. 60B and 60C are bar graphs showing K562 killing and NKp30 MFI, respectively, for the indicated treatment groups. The antibodies tested in this study include: IgG isotype control antibody, BIM0648, and BIM1603 (a bivalent anti-PDL1 antibody fused to TGFβ tap at the C-terminus of the Fc region).

[0290] FIGS. 61A-61C. UniTI-102 (BIM0648) reverses suppressive effect of TGFβ on primary human NK cell killing. FIG. 61A is a graph showing percent killing. FIGS. 61B and 61C are graphs showing percent CD56+ NKp30+ cells. The following groups were tested in this study: human IgG, BIM0648, BHM1603 (a bivalent anti-PDL1 antibody fused to TGFβ tap at the C-terminus of the Fc region), BHM1583 (a C-terminal Fc fusion of TGFβRII trap), without TGFβ (“NK”), and with TGFβ and without constructs (“TGFb”).

### DETAILED DESCRIPTION OF THE INVENTION

[0291] TAMs originate from circulating monocytes and their recruitment into tumors is driven by tumor-derived chemotactic factors. TAMs can promote tumor cell proliferation and metastasis by causing such responses as inhibition of B and T cell activation, inhibition of tumor-associated antigen presentation, inhibition of cytotoxic granule release, increased angiogenesis, and secretion a wide range of growth and proangiogenic factors (see e.g., Liu et al Cellular & Molecular Immunology (2015) 12, 1-4; and Noy, Roy et al Immunity, Volume 41, Issue 1, 49-61; and Quatromoni et al. Am J Transl Res. 2012; 4(4): 376-389). Consequently, many tumors with a high number of TAMs have an increased tumor growth rate, local proliferation and distant metastasis. Thus, therapies that deplete TAMs or inhibit their activity would be useful.

### Definitions

[0292] As used herein, the term “transforming growth factor beta-1 (TGF-beta 1)” refers to a protein that in humans is encoded by the gene TGFB1, or its orthologs. Swiss-Prot accession number P01137 provides exemplary human TGF-beta 1 amino acid sequences. An exemplary immature human TGF-beta 1 amino acid sequence is provided in SEQ ID NO: 92. An exemplary mature human TGF-beta 1 amino acid sequence is provided in SEQ ID NO: 117.

[0293] As used herein, the term “transforming growth factor beta-2 (TGF-beta 2)” refers to a protein that in humans is encoded by the gene TGFB2, or its orthologs. Swiss-Prot accession number P61812 provides exemplary human TGF-beta 2 amino acid sequences. An exemplary immature human TGF-beta 2 amino acid sequence is provided in SEQ ID NO: 93. An exemplary mature human TGF-beta 2 amino acid sequence is provided in SEQ ID NO: 118.

[0294] As used herein, the term “transforming growth factor beta-3 (TGF-beta 3)” refers to a protein that in humans is encoded by the gene TGFB3, or its orthologs. Swiss-Prot accession number P10600 provides exemplary human TGF-beta 3 amino acid sequences. An exemplary immature human TGF-beta 3 amino acid sequence is provided in SEQ ID NO: 94. An exemplary mature human TGF-beta 3 amino acid sequence is provided in SEQ ID NO: 119.

[0295] As used herein, a “TGF-beta receptor polypeptide” refers to a TGF-beta receptor (e.g., TGFBR1, TGFBR2, or TGFBR3) or its fragment, or variant thereof.

[0296] As used herein, the term “transforming growth factor beta receptor type 1 (TGFBR1)” (also known as ALK-5 or SKR4) refers to a protein that in humans is encoded by the gene TGFBR1, or its orthologs. Swiss-Prot accession number P36897 provides exemplary human TGFBR1 amino acid sequences. Exemplary immature human TGFBR1 amino acid sequences are provided in SEQ ID NOs: 95, 96, and 97. Exemplary mature human TGFBR1 amino acid sequences are provided in SEQ ID NOs: 120, 121, and 122. As used herein, a “TGFBR1 polypeptide” refers to a TGFBR1 or its fragment, or variant thereof.

[0297] As used herein, the term “transforming growth factor beta receptor type 2 (TGFBR2)” refers to a protein that in humans is encoded by the gene TGFBR2, or its orthologs. Swiss-Prot accession number P37173 provides exemplary human TGFBR2 amino acid sequences. Exemplary immature human TGFBR2 amino acid sequences are provided in SEQ ID NOs: 98 and 99. Exemplary mature human TGFBR2 amino acid sequences are provided in SEQ ID NOs: 123 and 124. As used herein, a “TGFBR2 polypeptide” refers to a TGFBR2 or its fragment, or variant thereof.

[0298] As used herein, the term “transforming growth factor beta receptor type 3 (TGFBR3)” refers to a protein that in humans is encoded by the gene TGFBR3, or its orthologs. Swiss-Prot accession number Q03167 provides exemplary human TGFBR3 amino acid sequences. Exemplary immature human TGFBR3 amino acid sequences are provided in SEQ ID NOs: 106 and 107. Exemplary mature human TGFBR3 amino acid sequences are provided in SEQ ID NOs: 125 and 126. As used herein, a “TGFBR3 polypeptide” refers to a TGFBR3 or its fragment, or variant thereof.

[0299] As used herein, the term “variant” of a parent sequence refers to a sequence that has a substantially identical amino acid sequence to the parent sequence, or a fragment thereof. In some embodiments, the variant is a functional variant.

[0300] As used herein, the articles “a” and “an” refer to one or more than one, e.g., to at least one, of the grammatical object of the article. The use of the words “a” or “an” when used in conjunction with the term “comprising” herein may mean “one,” but it is also consistent with the meaning of “one or more,” “at least one,” and “one or more than one.”

[0301] As used herein, “about” and “approximately” generally mean an acceptable degree of error for the quantity measured given the nature or precision of the measurements. Exemplary degrees of error are within 20 percent (%), typically, within 10%, and more typically, within 5% of a given range of values.

[0302] “Antibody molecule” as used herein refers to a protein, e.g., an immunoglobulin chain or fragment thereof, comprising at least one immunoglobulin variable region sequence. An antibody molecule encompasses antibodies (e.g., full-length antibodies) and antibody fragments. In an embodiment, an antibody molecule comprises an antigen binding or functional fragment of a full length antibody, or a full length immunoglobulin chain. For example, a full-length antibody is an immunoglobulin (Ig) molecule (e.g., an IgG antibody) that is naturally occurring or formed by normal immunoglobulin gene fragment recombinatorial processes). In embodiments, an antibody molecule refers to an immunologically active, antigen-binding portion of an immunoglobulin molecule, such as an antibody fragment. An antibody fragment, e.g., functional fragment, is a portion of an antibody, e.g., Fab, Fab′, F(ab′)₂, F(ab)₂, variable fragment (Fv), domain antibody (dAb), or single chain variable fragment (scFv). A functional antibody fragment binds to the same antigen as that recognized by the intact (e.g., full-length) antibody. The terms “antibody fragment” or “functional fragment” also include isolated fragments consisting of the variable regions, such as the “Fv” fragments consisting of the variable regions of the heavy and light chains or recombinant single chain polypeptide molecules in which light and heavy variable regions are connected by a peptide linker (“scFv proteins”). In some embodiments, an antibody fragment does not include portions of antibodies without antigen binding activity, such as Fc fragments or single amino acid residues. Exemplary antibody molecules include full length antibodies and antibody fragments, e.g., dAb (domain antibody), single chain, Fab, Fab′, and F(ab′)₂ fragments, and single chain variable fragments (scFvs).

[0303] As used herein, an “immunoglobulin variable region sequence” refers to an amino acid sequence which can form the structure of an immunoglobulin variable region. For example, the sequence may include all or part of the amino acid sequence of a naturally-occurring variable region. For example, the sequence may or may not include one, two, or more N- or C-terminal amino acids, or may include other alterations that are compatible with formation of the protein structure.

[0304] In embodiments, an antibody molecule is monospecific, e.g., it comprises binding specificity for a single epitope. In some embodiments, an antibody molecule is multispecific, e.g., it comprises a plurality of immunoglobulin variable region sequences, where a first immunoglobulin variable region sequence has binding specificity for a first epitope and a second immunoglobulin variable region sequence has binding specificity for a second epitope. In some embodiments, an antibody molecule is a bispecific antibody molecule. “Bispecific antibody molecule” as used herein refers to an antibody molecule that has specificity for more than one (e.g., two, three, four, or more) epitope and/or antigen.

[0305] “Antigen” (Ag) as used herein refers to a molecule that can provoke an immune response, e.g., involving activation of certain immune cells and/or antibody generation. Any macromolecule, including almost all proteins or peptides, can be an antigen. Antigens can also be derived from genomic recombinant or DNA. For example, any DNA comprising a nucleotide sequence or a partial nucleotide sequence that encodes a protein capable of eliciting an immune response encodes an “antigen.” In embodiments, an antigen does not need to be encoded solely by a full length nucleotide sequence of a gene, nor does an antigen need to be encoded by a gene at all. In embodiments, an antigen can be synthesized or can be derived from a biological sample, e.g., a tissue sample, a tumor sample, a cell, or a fluid with other biological components. As used, herein a “tumor antigen” or interchangeably, a “cancer antigen” includes any molecule present on, or associated with, a cancer, e.g., a cancer cell or a tumor microenvironment that can provoke an immune response. As used, herein an “immune cell antigen” includes any molecule present on, or associated with, an immune cell that can provoke an immune response.

[0306] The “antigen-binding site,” or “binding portion” of an antibody molecule refers to the part of an antibody molecule, e.g., an immunoglobulin (Ig) molecule, that participates in antigen binding. In embodiments, the antigen binding site is formed by amino acid residues of the variable (V) regions of the heavy (H) and light (L) chains. Three highly divergent stretches within the variable regions of the heavy and light chains, referred to as hypervariable regions, are disposed between more conserved flanking stretches called “framework regions,” (FRs). FRs are amino acid sequences that are naturally found between, and adjacent to, hypervariable regions in immunoglobulins. In embodiments, in an antibody molecule, the three hypervariable regions of a light chain and the three hypervariable regions of a heavy chain are disposed relative to each other in three dimensional space to form an antigen-binding surface, which is complementary to the three-dimensional surface of a bound antigen. The three hypervariable regions of each of the heavy and light chains are referred to as “complementarity-determining regions,” or “CDRs.” The framework region and CDRs have been defined and described, e.g., in Kabat, E. A., et al. (1991) Sequences of Proteins of Immunological Interest, Fifth Edition, U.S. Department of Health and Human Services, NIH Publication No. 91-3242, and Chothia, C. et al. (1987) J. Mol. Biol. 196:901-917. Each variable chain (e.g., variable heavy chain and variable light chain) is typically made up of three CDRs and four FRs, arranged from amino-terminus to carboxy-terminus in the amino acid order: FR1, CDR1, FR2, CDR2, FR3, CDR3, and FR4.

[0307] “Cancer” as used herein can encompass all types of oncogenic processes and/or cancerous growths. In embodiments, cancer includes primary tumors as well as metastatic tissues or malignantly transformed cells, tissues, or organs. In embodiments, cancer encompasses all histopathologies and stages, e.g., stages of invasiveness/severity, of a cancer. In embodiments, cancer includes relapsed and/or resistant cancer. The terms “cancer” and “tumor” can be used interchangeably. For example, both terms encompass solid and liquid tumors. As used herein, the term “cancer” or “tumor” includes premalignant, as well as malignant cancers and tumors.

[0308] The compositions and methods of the present invention encompass polypeptides and nucleic acids having the sequences specified, or sequences substantially identical or similar thereto, e.g., sequences at least 85%, 90%, 95% identical or higher to the sequence specified. In the context of an amino acid sequence, the term “substantially identical” is used herein to refer to a first amino acid that contains a sufficient or minimum number of amino acid residues that are i) identical to, or ii) conservative substitutions of aligned amino acid residues in a second amino acid sequence such that the first and second amino acid sequences can have a common structural domain and/or common functional activity. For example, amino acid sequences that contain a common structural domain having at least about 85%, 90%. 91%, 92%, 93%, 94%, 95%, 96%, 97%, 98% or 99% identity to a reference sequence, e.g., a sequence provided herein.

[0309] In the context of nucleotide sequence, the term “substantially identical” is used herein to refer to a first nucleic acid sequence that contains a sufficient or minimum number of nucleotides that are identical to aligned nucleotides in a second nucleic acid sequence such that the first and second nucleotide sequences encode a polypeptide having common functional activity, or encode a common structural polypeptide domain or a common functional polypeptide activity. For example, nucleotide sequences having at least about 85%, 90%, 91%, 92%, 93%, 94%, 95%, 96%, 97%, 98% or 99% identity to a reference sequence, e.g., a sequence provided herein.

[0310] Calculations of homology or sequence identity between sequences (the terms are used interchangeably herein) are performed as follows.

[0311] To determine the percent identity of two amino acid sequences, or of two nucleic acid sequences, the sequences are aligned for optimal comparison purposes (e.g., gaps can be introduced in one or both of a first and a second amino acid or nucleic acid sequence for optimal alignment and non-homologous sequences can be disregarded for comparison purposes). In a preferred embodiment, the length of a reference sequence aligned for comparison purposes is at least 30%, preferably at least 40%, more preferably at least 50%, 60%, and even more preferably at least 70%, 80%, 90%, 100% of the length of the reference sequence. The amino acid residues or nucleotides at corresponding amino acid positions or nucleotide positions are then compared. When a position in the first sequence is occupied by the same amino acid residue or nucleotide as the corresponding position in the second sequence, then the molecules are identical at that position (as used herein amino acid or nucleic acid “identity” is equivalent to amino acid or nucleic acid “homology”).

[0312] The percent identity between the two sequences is a function of the number of identical positions shared by the sequences, taking into account the number of gaps, and the length of each gap, which need to be introduced for optimal alignment of the two sequences.

[0313] The comparison of sequences and determination of percent identity between two sequences can be accomplished using a mathematical algorithm. In a preferred embodiment, the percent identity between two amino acid sequences is determined using the Needleman and Wunsch ((1970) J. Mol. Biol. 48:444-453) algorithm which has been incorporated into the GAP program in the GCG software package (available at http://www.gcg.com), using either a Blossum 62 matrix or a PAM250 matrix, and a gap weight of 16, 14, 12, 10, 8, 6, or 4 and a length weight of 1, 2, 3, 4, 5, or 6. In yet another preferred embodiment, the percent identity between two nucleotide sequences is determined using the GAP program in the GCG software package (available at http://www.gcg.com), using a NWSgapdna.CMP matrix and a gap weight of 40, 50, 60, 70, or 80 and a length weight of 1, 2, 3, 4, 5, or 6. A particularly preferred set of parameters (and the one that should be used unless otherwise specified) are a Blossum 62 scoring matrix with a gap penalty of 12, a gap extend penalty of 4, and a frameshift gap penalty of 5.

[0314] The percent identity between two amino acid or nucleotide sequences can be determined using the algorithm of E. Meyers and W. Miller ((1989) CABIOS, 4:11-17) which has been incorporated into the ALIGN program (version 2.0), using a PAM120 weight residue table, a gap length penalty of 12 and a gap penalty of 4.

[0315] The nucleic acid and protein sequences described herein can be used as a “query sequence” to perform a search against public databases to, for example, identify other family members or related sequences. Such searches can be performed using the NBLAST and XBLAST programs (version 2.0) of Altschul, et al. (1990) J. Mol. Biol. 215:403-10. BLAST nucleotide searches can be performed with the NBLAST program, score=100, wordlength=12 to obtain nucleotide sequences homologous to a nucleic acid (e.g., SEQ ID NO: 1) molecules of the invention. BLAST protein searches can be performed with the XBLAST program, score=50, wordlength=3 to obtain amino acid sequences homologous to protein molecules of the invention. To obtain gapped alignments for comparison purposes, Gapped BLAST can be utilized as described in Altschul et al., (1997) Nucleic Acids Res. 25:3389-3402. When utilizing BLAST and Gapped BLAST programs, the default parameters of the respective programs (e.g., XBLAST and NBLAST) can be used. See http://www.ncbi.nlm.nih.gov.

[0316] It is understood that the molecules of the present invention may have additional conservative or non-essential amino acid substitutions, which do not have a substantial effect on their functions.

[0317] The term “amino acid” is intended to embrace all molecules, whether natural or synthetic, which include both an amino functionality and an acid functionality and capable of being included in a polymer of naturally-occurring amino acids. Exemplary amino acids include naturally-occurring amino acids; analogs, derivatives and congeners thereof, amino acid analogs having variant side chains; and all stereoisomers of any of any of the foregoing. As used herein the term “amino acid” includes both the D- or L-optical isomers and peptidomimetics.

[0318] A “conservative amino acid substitution” is one in which the amino acid residue is replaced with an amino acid residue having a similar side chain. Families of amino acid residues having similar side chains have been defined in the art. These families include amino acids with basic side chains (e.g., lysine, arginine, histidine), acidic side chains (e.g., aspartic acid, glutamic acid), uncharged polar side chains (e.g., glycine, asparagine, glutamine, serine, threonine, tyrosine, cysteine), nonpolar side chains (e.g., alanine, valine, leucine, isoleucine, proline, phenylalanine, methionine, tryptophan), beta-branched side chains (e.g., threonine, valine, isoleucine) and aromatic side chains (e.g., tyrosine, phenylalanine, tryptophan, histidine).

[0319] The terms “polypeptide”, “peptide” and “protein” (if single chain) are used interchangeably herein to refer to polymers of amino acids of any length. The polymer may be linear or branched, it may comprise modified amino acids, and it may be interrupted by non-amino acids. The terms also encompass an amino acid polymer that has been modified; for example, disulfide bond formation, glycosylation, lipidation, acetylation, phosphorylation, or any other manipulation, such as conjugation with a labeling component. The polypeptide can be isolated from natural sources, can be a produced by recombinant techniques from a eukaryotic or prokaryotic host, or can be a product of synthetic procedures.

[0320] The terms “nucleic acid,” “nucleic acid sequence,” “nucleotide sequence,” or “polynucleotide sequence,” and “polynucleotide” are used interchangeably. They refer to a polymeric form of nucleotides of any length, either deoxyribonucleotides or ribonucleotides, or analogs thereof. The polynucleotide may be either single-stranded or double-stranded, and if single-stranded may be the coding strand or non-coding (antisense) strand. A polynucleotide may comprise modified nucleotides, such as methylated nucleotides and nucleotide analogs. The sequence of nucleotides may be interrupted by non-nucleotide components. A polynucleotide may be further modified after polymerization, such as by conjugation with a labeling component. The nucleic acid may be a recombinant polynucleotide, or a polynucleotide of genomic, cDNA, semisynthetic, or synthetic origin which either does not occur in nature or is linked to another polynucleotide in a non-natural arrangement.

[0321] The term “isolated,” as used herein, refers to material that is removed from its original or native environment (e.g., the natural environment if it is naturally occurring). For example, a naturally-occurring polynucleotide or polypeptide present in a living animal is not isolated, but the same polynucleotide or polypeptide, separated by human intervention from some or all of the co-existing materials in the natural system, is isolated. Such polynucleotides could be part of a vector and/or such polynucleotides or polypeptides could be part of a composition, and still be isolated in that such vector or composition is not part of the environment in which it is found in nature.

[0322] As used herein, the term “immunosuppressive myeloid cell” or “IMC” generally refers to a cell of myeloid lineage that promotes immunosuppression (e.g., in a tumor microenvironment) (e.g., by inhibiting T cell activation, inhibiting T cell viability, promoting T regulatory cell induction and recruitment). Immunosuppressive myeloid cells include, e.g., tumor associated macrophages (TAMs) and myeloid derived suppressor cells (MDSCs).

[0323] As used herein, the term “tumor associated macrophage” or “TAM” generally refers to a macrophage that exists in the microenvironment of a cancer, for example, a tumor.

[0324] As used herein, the term “reducing TAMs” generally refers to decreasing the number of TAMs. Reducing includes decreasing the number of TAMs in a tumor or near a tumor (e.g., as compared to the number of TAMs prior to administration of a multispecific molecule described herein (e.g., prior to 1, 2, 3, 4, 5, 6, 7, 8, 9, 10 or more administrations of a multispecific molecule described herein). Reducing includes decreasing any number of TAMs (e.g., 1%, 5%, 10%, 20%, 30%, 40%, 50%, 60%, 70%, 80%, 90%, 95%, 99%, 100%, all, or substantially) (e.g., as compared to the number of TAMs prior to administration of a multispecific molecule described herein (e.g., prior to 1, 2, 3, 4, 5, 6, 7, 8, 9, 10 or more administrations of a multispecific molecule described herein).

[0325] As used herein, the term “myeloid derived suppressor cell” or “MDSC” generally refers to a cell of myeloid origin that is capable of promoting immunosuppression and commonly express CD33, CD11b and CD45. Various subpopulations of MDSCs have been defined, for example monocytic-MDSCs (M-MDSCs) are commonly associated with expression of CD14 and CD124 and low expression of HLA-DR. In some embodiments, the MDSC population is an MO-MDSC population. Polymorphonuclear MDSCs (PMN-MDSCs) are associated with expression of CD15, CD66b, and CD124, and no expression of HLA-DR. Immature MDSCs (I-MDSCs) are associated with expression of CD117 and CD34 and no expression of LIN and HLA-DR. See e.g., Ugel et al. (2015) JCI Vol 125 (9), page 3365.

[0326] As used herein, the term “a CSF1R-positive, CCR2-positive cell” refers to a cell expressing both CSF1R and CCR2 on the cell surface. The term “a CSF1R-positive, CCR2-negative cell” refers to a cell expressing CSF1R, but not CCR2 on the cell surface. The term “a CSF1R-negative, CCR2-positive cell” refers to a cell expressing CCR2, but not CSF1R on the cell surface.

[0327] As used herein, a binding moiety, e.g., an antibody molecule, binds to a target monovalently, when the binding moiety, e.g., the antibody molecule, binds to a single epitope on the target. In some embodiments, the binding moiety comprises only one antigen binding domain to the target. In some embodiments, one molecule of the binding moiety can only bind to one molecule of the target.

[0328] As used herein, a binding moiety, e.g., an antibody molecule, binds to a target bivalently, when the binding moiety, e.g., the antibody molecule, binds to two epitopes on the target. In some embodiments, the two epitopes are identical. In some embodiments, the two epitopes are different. In some embodiments, the binding moiety comprises two antigen binding domains to the target. In some embodiments, one molecule of the binding moiety can bind to two molecules of the target.

[0329] Various aspects of the invention are described in further detail below. Additional definitions are set out throughout the specification.

### Antigens

[0330] TAM targeting antigens of the present disclosure include, e.g., CSF1R, CCR2, CXCR2, CD68, CD163, CX3CR1, MARCO, CD204, CD52, and folate receptor beta. Exemplary amino acid sequences of TAM targeting antigens are provided herein.

### CSF1R

[0331] CSF1R (also known as Macrophage colony-stimulating factor 1 receptor) is a tyrosine-protein kinase that acts as cell-surface receptor for CSF1 and IL34 and plays an essential role in the regulation of survival, proliferation and differentiation of hematopoietic precursor cells, especially mononuclear phagocytes, such as macrophages and monocytes. CSF1R promotes the release of pro-inflammatory chemokines in response to IL34 and CSF1, and thereby plays an important role in innate immunity and in inflammatory processes. Exemplary CSF1R immature amino acid sequences are provided in SEQ ID NOs: 87 and 88.

CSF1R immature amino acid sequence isoform 1
(identifier: P07333-1):
SEQ ID NO: 87
MGPGVLLLLLVATAWHGQGIPVIEPSVPELVVKPGATVTLRCVGNGSVEW
DGPPSPHWTLYSDGSSSILSTNNATFQNTGTYRCTEPGDPLGGSAAIHLY
VKDPARPWNVLAQEVVVFEDQDALLPCLLTDPVLEAGVSLVRVRGRPLMR
HTNYSFSPWHGFTIHRAKFIQSQDYQCSALMGGRKVMSISIRLKVQKVIP
GPPALTLVPAELVRIRGEAAQIVCSASSVDVNFDVFLQHNNTKLAIPQQS
DFHNNRYQKVLTLNLDQVDFQHAGNYSCVASNVQGKHSTSMFFRVVESAY
LNLSSEQNLIQEVTVGEGLNLKVMVEAYPGLQGFNWTYLGPFSDHQPEPK
LANATTKDTYRHTFTLSLPRLKPSEAGRYSFLARNPGGWRALTFELTLRY
PPEVSVIWTFINGSGTLLCAASGYPQPNVTWLQCSGHTDRCDEAQVLQVW
DDPYPEVLSQEPFHKVTVQSLLTVETLEHNQTYECRAHNSVGSGSWAFIP
ISAGAHTHPPDEFLFTPVVVACMSIMALLLLLLLLLLYKYKQKPKYQVRW
KIIESYEGNSYTFIDPTQLPYNEKWEFPRNNLQFGKTLGAGAFGKVVEAT
AFGLGKEDAVLKVAVKMLKSTAHADEKEALMSELKIMSHLGQHENIVNLL
GACTHGGPVLVITEYCCYGDLLNFLRRKAEAMLGPSLSPGQDPEGGVDYK
NIHLEKKYVRRDSGFSSQGVDTYVEMRPVSTSSNDSFSEQDLDKEDGRPL
ELRDLLHFSSQVAQGMAFLASKNCIHRDVAARNVLLTNGHVAKIGDFGLA
RDIMNDSNYIVKGNARLPVKWMAPESIFDCVYTVQSDVWSYGILLWEIFS
LGLNPYPGILVNSKFYKLVKDGYQMAQPAFAPKNIYSIMQACWALEPTHR
PTFQQICSFLQEQAQEDRRERDYTNLPSSSRSGGSGSSSSELEEESSSEH
LTCCEQGDIAQPLLQPNNYQFC
CSF1R immature amino acid sequence isoform 2
(identifier: P07333-2):
SEQ ID NO: 88
MGPGVLLLLLVATAWHGQGIPVIEPSVPELVVKPGATVTLRCVGNGSVEW
DGPPSPHWTLYSDGSSSILSTNNATFQNTGTYRCTEPGDPLGGSAAIHLY
VKDPARPWNVLAQEVVVFEDQDALLPCLLTDPVLEAGVSLVRVRGRPLMR
HTNYSFSPWHGFTIHRAKFIQSQDYQCSALMGGRKVMSISIRLKVQKVIP
GPPALTLVPAELVRIRGEAAQIVCSASSVDVNFDVFLQHNNTKLAIPQQS
DFHNNRYQKVLTLNLDQVDFQHAGNYSCVASNVQGKHSTSMFFRVVGTPS
PSLCPA

### CCR2

[0332] CCR2 (also known as C—C chemokine receptor type 2) is a G protein coupled receptor for the CCL2, CCL7 and CCL13 chemokines. CCR2 is known to function in the recruitment of monocytes/macrophages and T cells. CCR2 is expressed is expressed on monocytes and a small subpopulation of T cells and exhibits an almost identical expression pattern in mice and humans (Mack et al. J Immunol 2001; 166:4697-4704). Exemplary CCR2 amino acid sequences are provided in SEQ ID NOs: 89 and 90.

CCR2 amino acid sequence isoform A (Identifier:
P41597-1):
SEQ ID NO: 89
MLSTSRSRFIRNTNESGEEVTTFFDYDYGAPCHKFDVKQIGAQLLPPLYS
LVFIFGFVGNMLVVLILINCKKLKCLTDIYLLNLAISDLLFLITLPLWAH
SAANEWVFGNAMCKLFTGLYHIGYFGGIFFIILLTIDRYLAIVHAVFALK
ARTVTFGVVTSVITWLVAVFASVPGIIFTKCQKEDSVYVCGPYFPRGWNN
FHTIMRNILGLVLPLLIMVICYSGILKTLLRCRNEKKRHRAVRVIFTIMI
VYFLFWTPYNIVILLNTFQEFFGLSNCESTSQLDQATQVTETLGMTHCCI
NPIIYAFVGEKFRSLFHIALGCRIAPLQKPVCGGPGVRPGKNVKVTTQGL
LDGRGKGKSIGRAPEASLQDKEGA
CCR2 amino acid sequence isoform B (Identifier:
P41597-2):
SEQ ID NO: 90
MLSTSRSRFIRNTNESGEEVTTFFDYDYGAPCHKFDVKQIGAQLLPPLYS
LVFIFGFVGNMLVVLILINCKKLKCLTDIYLLNLAISDLLFLITLPLWAH
SAANEWVFGNAMCKLFTGLYHIGYFGGIFFIILLTIDRYLAIVHAVFALK
ARTVTFGVVTSVITWLVAVFASVPGIIFTKCQKEDSVYVCGPYFPRGWNN
FHTIMRNILGLVLPLLIMVICYSGILKTLLRCRNEKKRHRAVRVIFTIMI
VYFLFWTPYNIVILLNTFQEFFGLSNCESTSQLDQATQVTETLGMTHCCI
NPIIYAFVGEKFRRYLSVFFRKHITKRFCKQCPVFYRETVDGVTSTNTPS
TGEQEVSAGL

### CXCR2

[0333] CXCR2 (also known as interleukin-8 receptor) is the G protein coupled receptor for IL8 which is a neutrophil chemotactic factor. Binding of IL8 to the receptor causes activation of neutrophils. This response is mediated via a G-protein that activates a phosphatidylinositol-calcium second messenger system. CXCR2 binds to IL-8 with high affinity, and also binds with high affinity to CXCL3, GRO/MGSA and NAP-2. CXCR2 is expressed at high levels on circulating neutrophils and is critical for directing their migration to sites of inflammation (J Clin Invest. 2012; 122(9):3127-3144). An exemplary CXCR2 amino acid sequence is provided in SEQ ID NO: 91.

CXCR2 amino acid sequence (Identifier: P25025-1):
SEQ ID NO: 91
MEDFNMESDSFEDFWKGEDLSNYSYSSTLPPFLLDAAPCEPESLEINKYF
VVIIYALVFLLSLLGNSLVMLVILYSRVGRSVTDVYLLNLALADLLFALT
LPIWAASKVNGWIFGTFLCKVVSLLKEVNFYSGILLLACISVDRYLAIVH
ATRTLTQKRYLVKFICLSIWGLSLLLALPVLLFRRTVYSSNVSPACYEDM
GNNTANWRMLLRILPQSFGFIVPLLIMLFCYGFTLRTLFKAHMGQKHRAM
IRVIFAVVLIFLLCWLPYNLVLLADTLMRTQVIQETCERRNHIDRALDAT
EILGILHSCLNPLIYAFIGQKFRHGLLKILAIHGLISKDSLPKDSRPSFV
GSSSGHTSTTL

### Exemplary Antibodies

[0334] Exemplary antibodies binding TAM antigens are provided throughout the specification and below. Exemplary anti-CSF1R antibodies are described herein as well as in WO2009026303A1; WO2011123381A1; WO2016207312A1; WO2016106180A1; US20160220669A1; US20160326254A1; WO2013169264A1; WO2013087699A1; WO2011140249A2; WO2011131407A1; WO2011123381A1; WO2011107553A1; and WO2011070024A1, all of which are herein incorporated by reference in their entirety. Exemplary CCR2 antibodies are described herein as well as in WO2013192596A2; WO2010021697A2; WO2001057226A1; and WO1997031949A1, all of which are herein incorporated by reference in their entirety. Exemplary CXCR2 antibodies are described in WO2014170317A1 and US20160060347 (see e.g., a) SEQ ID NO: 14 (light chain) and SEQ ID NO: 15 (heavy chain); b) SEQ ID NO: 24 (light chain) and SEQ ID NO: 25 (heavy chain); c) SEQ ID NO: 34 (light chain) and SEQ ID NO: 35 (heavy chain); d) SEQ ID NO: 44 (light chain) and SEQ ID NO: 45 (heavy chain); e) SEQ ID NO: 54 (light chain) and SEQ ID NO: 55 (heavy chain); f) SEQ ID NO: 64 (light chain) and SEQ ID NO: 65 (heavy chain); g) SEQ ID NO: 74 (light chain) and SEQ ID NO: 75 (heavy chain); h) SEQ ID NO: 84 (light chain) and SEQ ID NO: 85 (heavy chain)), all of which are herein incorporated by reference in their entirety. Exemplary anti-CD163 antibodies are provided in US20120258107 (see e.g., MAC2158, MAC2-48), herein incorporated by reference in its entirety. Exemplary anti-CD52 antibodies are described in US20050152898, herein incorporated by reference in its entirety. Exemplary anti-folate antibodies are described in U.S. Pat. No. 9,522,196, herein incorporated by reference in its entirety. Exemplary anti-CD52 antibodies are described in US20050152898, herein incorporated by reference in its entirety. Exemplary anti-MARCO antibodies are described in WO2016196612, herein incorporated by reference in its entirety.

### Antibody Molecules

[0335] In one embodiment, the multispecific molecule comprises an antibody molecule that binds to a first tumor associated macrophage (TAM) antigen; and an antibody molecule that binds to a second TAM antigen. In some embodiments, the first and/or second TAM antigen is, e.g., a mammalian, e.g., a human. For example, the antibody molecule binds specifically to an epitope, e.g., linear or conformational epitope, on the TAM antigen.

[0336] In one embodiment, the multispecific molecule comprises an antibody molecule that binds to a first myeloid derived suppressor cell (MDSC) antigen; and an antibody molecule that binds to a second MDSC antigen. In some embodiments, the first and/or second MDSC antigen is, e.g., a mammalian, e.g., a human. For example, the antibody molecule binds specifically to an epitope, e.g., linear or conformational epitope, on the MDSC antigen.

[0337] In an embodiment, an antibody molecule is a monospecific antibody molecule and binds a single epitope. E.g., a monospecific antibody molecule having a plurality of immunoglobulin variable region sequences, each of which binds the same epitope.

[0338] In an embodiment an antibody molecule is a multispecific antibody molecule, e.g., it comprises a plurality of immunoglobulin variable region sequences, wherein a first immunoglobulin variable region sequence of the plurality has binding specificity for a first epitope and a second immunoglobulin variable region sequence of the plurality has binding specificity for a second epitope. In an embodiment the first and second epitopes are on the same antigen, e.g., the same protein (or subunit of a multimeric protein). In an embodiment the first and second epitopes overlap. In an embodiment the first and second epitopes do not overlap. In an embodiment the first and second epitopes are on different antigens, e.g., the different proteins (or different subunits of a multimeric protein). In an embodiment a multispecific antibody molecule comprises a third, fourth or fifth immunoglobulin variable region. In an embodiment, a multispecific antibody molecule is a bispecific antibody molecule, a trispecific antibody molecule, or a tetraspecific antibody molecule.

[0339] In an embodiment a multispecific antibody molecule is a bispecific antibody molecule. A bispecific antibody has specificity for no more than two antigens. A bispecific antibody molecule is characterized by a first immunoglobulin variable region sequence which has binding specificity for a first epitope and a second immunoglobulin variable region sequence that has binding specificity for a second epitope. In an embodiment the first and second epitopes are on the same antigen, e.g., the same protein (or subunit of a multimeric protein). In an embodiment the first and second epitopes overlap. In an embodiment the first and second epitopes do not overlap. In an embodiment the first and second epitopes are on different antigens, e.g., the different proteins (or different subunits of a multimeric protein). In an embodiment a bispecific antibody molecule comprises a heavy chain variable region sequence and a light chain variable region sequence which have binding specificity for a first epitope and a heavy chain variable region sequence and a light chain variable region sequence which have binding specificity for a second epitope. In an embodiment a bispecific antibody molecule comprises a half antibody having binding specificity for a first epitope and a half antibody having binding specificity for a second epitope. In an embodiment a bispecific antibody molecule comprises a half antibody, or fragment thereof, having binding specificity for a first epitope and a half antibody, or fragment thereof, having binding specificity for a second epitope. In an embodiment a bispecific antibody molecule comprises a scFv or a Fab, or fragment thereof, have binding specificity for a first epitope and a scFv or a Fab, or fragment thereof, have binding specificity for a second epitope.

[0340] In an embodiment, an antibody molecule comprises a diabody, and a single-chain molecule, as well as an antigen-binding fragment of an antibody (e.g., Fab, F(ab′)₂, and Fv). For example, an antibody molecule can include a heavy (H) chain variable region sequence (abbreviated herein as VH), and a light (L) chain variable region sequence (abbreviated herein as VL). In an embodiment an antibody molecule comprises or consists of a heavy chain and a light chain (referred to herein as a half antibody. In another example, an antibody molecule includes two heavy (H) chain variable region sequences and two light (L) chain variable region sequence, thereby forming two antigen binding sites, such as Fab, Fab′, F(ab′)₂, Fc, Fd, Fd′, Fv, single chain antibodies (scFv for example), single variable region antibodies, diabodies (Dab) (bivalent and bispecific), and chimeric (e.g., humanized) antibodies, which may be produced by the modification of whole antibodies or those synthesized de novo using recombinant DNA technologies. These functional antibody fragments retain the ability to selectively bind with their respective antigen or receptor. Antibodies and antibody fragments can be from any class of antibodies including, but not limited to, IgG, IgA, IgM, IgD, and IgE, and from any subclass (e.g., IgG1, IgG2, IgG3, and IgG4) of antibodies. The a preparation of antibody molecules can be monoclonal or polyclonal. An antibody molecule can also be a human, humanized, CDR-grafted, or in vitro generated antibody. The antibody can have a heavy chain constant region chosen from, e.g., IgG1, IgG2, IgG3, or IgG4. The antibody can also have a light chain chosen from, e.g., kappa or lambda. The term “immunoglobulin” (Ig) is used interchangeably with the term “antibody” herein.

[0341] Examples of antigen-binding fragments of an antibody molecule include: (i) a Fab fragment, a monovalent fragment consisting of the VL, VH, CL and CH1 domains; (ii) a F(ab′)2 fragment, a bivalent fragment comprising two Fab fragments linked by a disulfide bridge at the hinge region; (iii) a Fd fragment consisting of the VH and CH1 domains; (iv) a Fv fragment consisting of the VL and VH domains of a single arm of an antibody, (v) a diabody (dAb) fragment, which consists of a VH domain; (vi) a camelid or camelized variable region; (vii) a single chain Fv (scFv), see e.g., Bird et al. (1988) Science 242:423-426; and Huston et al. (1988) Proc. Natl. Acad. Sci. USA 85:5879-5883); (viii) a single domain antibody. These antibody fragments are obtained using conventional techniques known to those with skill in the art, and the fragments are screened for utility in the same manner as are intact antibodies.

[0342] Antibody molecules include intact molecules as well as functional fragments thereof. Constant regions of the antibody molecules can be altered, e.g., mutated, to modify the properties of the antibody (e.g., to increase or decrease one or more of: Fc receptor binding, antibody glycosylation, the number of cysteine residues, effector cell function, or complement function).

[0343] Antibody molecules can also be single domain antibodies. Single domain antibodies can include antibodies whose complementary determining regions are part of a single domain polypeptide. Examples include, but are not limited to, heavy chain antibodies, antibodies naturally devoid of light chains, single domain antibodies derived from conventional 4-chain antibodies, engineered antibodies and single domain scaffolds other than those derived from antibodies. Single domain antibodies may be any of the art, or any future single domain antibodies. Single domain antibodies may be derived from any species including, but not limited to mouse, human, camel, llama, fish, shark, goat, rabbit, and bovine. According to another aspect of the invention, a single domain antibody is a naturally occurring single domain antibody known as heavy chain antibody devoid of light chains. Such single domain antibodies are disclosed in WO 9404678, for example. For clarity reasons, this variable region derived from a heavy chain antibody naturally devoid of light chain is known herein as a VHH or nanobody to distinguish it from the conventional VH of four chain immunoglobulins. Such a VHH molecule can be derived from antibodies raised in Camelidae species, for example in camel, llama, dromedary, alpaca and guanaco. Other species besides Camelidae may produce heavy chain antibodies naturally devoid of light chain; such VHHs are within the scope of the invention.

[0344] The VH and VL regions can be subdivided into regions of hypervariability, termed “complementarity determining regions” (CDR), interspersed with regions that are more conserved, termed “framework regions” (FR or FW).

[0345] The extent of the framework region and CDRs has been precisely defined by a number of methods (see, Kabat, E. A., et al. (1991) Sequences of Proteins of Immunological Interest, Fifth Edition, U.S. Department of Health and Human Services, NIH Publication No. 91-3242; Chothia, C. et al. (1987) J. Mol. Biol. 196:901-917; and the AbM definition used by Oxford Molecular's AbM antibody modeling software. See, generally, e.g., Protein Sequence and Structure Analysis of Antibody Variable Domains. In: Antibody Engineering Lab Manual (Ed.: Duebel, S. and Kontermann, R., Springer-Verlag, Heidelberg).

[0346] The terms “complementarity determining region,” and “CDR,” as used herein refer to the sequences of amino acids within antibody variable regions which confer antigen specificity and binding affinity. In general, there are three CDRs in each heavy chain variable region (HCDR1, HCDR2, HCDR3) and three CDRs in each light chain variable region (LCDR1, LCDR2, LCDR3).

[0347] The precise amino acid sequence boundaries of a given CDR can be determined using any of a number of known schemes, including those described by Kabat et al. (1991), “Sequences of Proteins of Immunological Interest,” 5th Ed. Public Health Service, National Institutes of Health, Bethesda, Md. (“Kabat” numbering scheme), Al-Lazikani et al., (1997) JMB 273,927-948 (“Chothia” numbering scheme). As used herein, the CDRs defined according the “Chothia” number scheme are also sometimes referred to as “hypervariable loops.”

[0348] For example, under Kabat, the CDR amino acid residues in the heavy chain variable region (VH) are numbered 31-35 (HCDR1), 50-65 (HCDR2), and 95-102 (HCDR3); and the CDR amino acid residues in the light chain variable region (VL) are numbered 24-34 (LCDR1), 50-56 (LCDR2), and 89-97 (LCDR3). Under Chothia, the CDR amino acids in the VH are numbered 26-32 (HCDR1), 52-56 (HCDR2), and 95-102 (HCDR3); and the amino acid residues in VL are numbered 26-32 (LCDR1), 50-52 (LCDR2), and 91-96 (LCDR3).

[0349] Each VH and VL typically includes three CDRs and four FRs, arranged from amino-terminus to carboxy-terminus in the following order: FR1, CDR1, FR2, CDR2, FR3, CDR3, FR4.

[0350] The antibody molecule can be a polyclonal or a monoclonal antibody. The terms “monoclonal antibody” or “monoclonal antibody composition” as used herein refer to a preparation of antibody molecules of single molecular composition. A monoclonal antibody composition displays a single binding specificity and affinity for a particular epitope. A monoclonal antibody can be made by hybridoma technology or by methods that do not use hybridoma technology (e.g., recombinant methods).

[0351] The antibody can be recombinantly produced, e.g., produced by phage display or by combinatorial methods.

[0352] Phage display and combinatorial methods for generating antibodies are known in the art (as described in, e.g., Ladner et al. U.S. Pat. No. 5,223,409; Kang et al. International Publication No. WO 92/18619; Dower et al. International Publication No. WO 91/17271; Winter et al. International Publication WO 92/20791; Markland et al. International Publication No. WO 92/15679; Breitling et al. International Publication WO 93/01288; McCafferty et al. International Publication No. WO 92/01047; Garrard et al. International Publication No. WO 92/09690; Ladner et al. International Publication No. WO 90/02809; Fuchs et al. (1991) Bio/Technology 9:1370-1372; Hay et al. (1992) Hum Antibod Hybridomas 3:81-85; Huse et al. (1989) Science 246:1275-1281; Griffths et al. (1993) EMBO J 12:725-734; Hawkins et al. (1992) J Mol Biol 226:889-896; Clackson et al. (1991) Nature 352:624-628; Gram et al. (1992) PNAS 89:3576-3580; Garrad et al. (1991) Bio/Technology 9:1373-1377; Hoogenboom et al. (1991) Nuc Acid Res 19:4133-4137; and Barbas et al. (1991) PNAS 88:7978-7982, the contents of all of which are incorporated by reference herein).

[0353] In one embodiment, the antibody is a fully human antibody (e.g., an antibody made in a mouse which has been genetically engineered to produce an antibody from a human immunoglobulin sequence), or a non-human antibody, e.g., a rodent (mouse or rat), goat, primate (e.g., monkey), camel antibody. Preferably, the non-human antibody is a rodent (mouse or rat antibody). Methods of producing rodent antibodies are known in the art.

[0354] Human monoclonal antibodies can be generated using transgenic mice carrying the human immunoglobulin genes rather than the mouse system. Splenocytes from these transgenic mice immunized with the antigen of interest are used to produce hybridomas that secrete human mAbs with specific affinities for epitopes from a human protein (see, e.g., Wood et al. International Application WO 91/00906, Kucherlapati et al. PCT publication WO 91/10741; Lonberg et al. International Application WO 92/03918; Kay et al. International Application 92/03917; Lonberg, N. et al. 1994 Nature 368:856-859; Green, L. L. et al. 1994 Nature Genet. 7:13-21; Morrison, S. L. et al. 1994 Proc. Natl. Acad. Sci. USA 81:6851-6855; Bruggeman et al. 1993 Year Immunol 7:33-40; Tuaillon et al. 1993 PNAS 90:3720-3724; Bruggeman et al. 1991 Eur J Immunol 21:1323-1326).

[0355] An antibody molecule can be one in which the variable region, or a portion thereof, e.g., the CDRs, are generated in a non-human organism, e.g., a rat or mouse. Chimeric, CDR-grafted, and humanized antibodies are within the invention. Antibody molecules generated in a non-human organism, e.g., a rat or mouse, and then modified, e.g., in the variable framework or constant region, to decrease antigenicity in a human are within the invention.

[0356] An “effectively human” protein is a protein that does substantially not evoke a neutralizing antibody response, e.g., the human anti-murine antibody (HAMA) response. HAMA can be problematic in a number of circumstances, e.g., if the antibody molecule is administered repeatedly, e.g., in treatment of a chronic or recurrent disease condition. A HAMA response can make repeated antibody administration potentially ineffective because of an increased antibody clearance from the serum (see, e.g., Saleh et al., Cancer Immunol. Immunother., 32:180-190 (1990)) and also because of potential allergic reactions (see, e.g., LoBuglio et al., Hybridoma, 5:5117-5123 (1986)).

[0357] Chimeric antibodies can be produced by recombinant DNA techniques known in the art (see Robinson et al., International Patent Publication PCT/US86/02269; Akira, et al., European Patent Application 184,187; Taniguchi, M., European Patent Application 171,496; Morrison et al., European Patent Application 173,494; Neuberger et al., International Application WO 86/01533; Cabilly et al. U.S. Pat. No. 4,816,567; Cabilly et al., European Patent Application 125,023; Better et al. (1988 Science 240:1041-1043); Liu et al. (1987) PNAS 84:3439-3443; Liu et al., 1987, J. Immunol. 139:3521-3526; Sun et al. (1987) PNAS 84:214-218; Nishimura et al., 1987, Canc. Res. 47:999-1005; Wood et al. (1985) Nature 314:446-449; and Shaw et al., 1988, J. Natl Cancer Inst. 80:1553-1559).

[0358] A humanized or CDR-grafted antibody will have at least one or two but generally all three recipient CDRs (of heavy and or light immuoglobulin chains) replaced with a donor CDR. The antibody may be replaced with at least a portion of a non-human CDR or only some of the CDRs may be replaced with non-human CDRs. It is only necessary to replace the number of CDRs required for binding to the antigen. Preferably, the donor will be a rodent antibody, e.g., a rat or mouse antibody, and the recipient will be a human framework or a human consensus framework. Typically, the immunoglobulin providing the CDRs is called the “donor” and the immunoglobulin providing the framework is called the “acceptor.” In one embodiment, the donor immunoglobulin is a non-human (e.g., rodent). The acceptor framework is a naturally-occurring (e.g., a human) framework or a consensus framework, or a sequence about 85% or higher, preferably 90%, 95%, 99% or higher identical thereto.

[0359] As used herein, the term “consensus sequence” refers to the sequence formed from the most frequently occurring amino acids (or nucleotides) in a family of related sequences (See e.g., Winnaker, From Genes to Clones (Verlagsgesellschaft, Weinheim, Germany 1987). In a family of proteins, each position in the consensus sequence is occupied by the amino acid occurring most frequently at that position in the family. If two amino acids occur equally frequently, either can be included in the consensus sequence. A “consensus framework” refers to the framework region in the consensus immunoglobulin sequence.

[0360] An antibody molecule can be humanized by methods known in the art (see e.g., Morrison, S. L., 1985, Science 229:1202-1207, by Oi et al., 1986, BioTechniques 4:214, and by Queen et al. U.S. Pat. Nos. 5,585,089, 5,693,761 and 5,693,762, the contents of all of which are hereby incorporated by reference).

[0361] Humanized or CDR-grafted antibody molecules can be produced by CDR-grafting or CDR substitution, wherein one, two, or all CDRs of an immunoglobulin chain can be replaced. See e.g., U.S. Pat. No. 5,225,539; Jones et al. 1986 Nature 321:552-525; Verhoeyan et al. 1988 Science 239:1534; Beidler et al. 1988 J. Immunol. 141:4053-4060; Winter U.S. Pat. No. 5,225,539, the contents of all of which are hereby expressly incorporated by reference. Winter describes a CDR-grafting method which may be used to prepare the humanized antibodies of the present invention (UK Patent Application GB 2188638A, filed on Mar. 26, 1987; Winter U.S. Pat. No. 5,225,539), the contents of which is expressly incorporated by reference.

[0362] Also within the scope of the invention are humanized antibody molecules in which specific amino acids have been substituted, deleted or added. Criteria for selecting amino acids from the donor are described in U.S. Pat. No. 5,585,089, e.g., columns 12-16 of U.S. Pat. No. 5,585,089, e.g., columns 12-16 of U.S. Pat. No. 5,585,089, the contents of which are hereby incorporated by reference. Other techniques for humanizing antibodies are described in Padlan et al. EP 519596 A1, published on Dec. 23, 1992.

[0363] The antibody molecule can be a single chain antibody. A single-chain antibody (scFV) may be engineered (see, for example, Colcher, D. et al. (1999) Ann N Y Acad Sci 880:263-80; and Reiter, Y. (1996) Clin Cancer Res 2:245-52). The single chain antibody can be dimerized or multimerized to generate multivalent antibodies having specificities for different epitopes of the same target protein.

[0364] In yet other embodiments, the antibody molecule has a heavy chain constant region chosen from, e.g., the heavy chain constant regions of IgG1, IgG2, IgG3, IgG4, IgM, IgA1, IgA2, IgD, and IgE; particularly, chosen from, e.g., the (e.g., human) heavy chain constant regions of IgG1, IgG2, IgG3, and IgG4. In another embodiment, the antibody molecule has a light chain constant region chosen from, e.g., the (e.g., human) light chain constant regions of kappa or lambda. The constant region can be altered, e.g., mutated, to modify the properties of the antibody (e.g., to increase or decrease one or more of: Fc receptor binding, antibody glycosylation, the number of cysteine residues, effector cell function, and/or complement function). In one embodiment the antibody has: effector function; and can fix complement. In other embodiments the antibody does not; recruit effector cells; or fix complement. In another embodiment, the antibody has reduced or no ability to bind an Fc receptor. For example, it is a isotype or subtype, fragment or other mutant, which does not support binding to an Fc receptor, e.g., it has a mutagenized or deleted Fc receptor binding region.

[0365] Methods for altering an antibody constant region are known in the art. Antibodies with altered function, e.g. altered affinity for an effector ligand, such as FcR on a cell, or the C1 component of complement can be produced by replacing at least one amino acid residue in the constant portion of the antibody with a different residue (see e.g., EP 388,151 A1, U.S. Pat. Nos. 5,624,821 and 5,648,260, the contents of all of which are hereby incorporated by reference). Similar type of alterations could be described which if applied to the murine, or other species immunoglobulin would reduce or eliminate these functions.

[0366] An antibody molecule can be derivatized or linked to another functional molecule (e.g., another peptide or protein). As used herein, a “derivatized” antibody molecule is one that has been modified. Methods of derivatization include but are not limited to the addition of a fluorescent moiety, a radionucleotide, a toxin, an enzyme or an affinity ligand such as biotin. Accordingly, the antibody molecules of the invention are intended to include derivatized and otherwise modified forms of the antibodies described herein, including immunoadhesion molecules. For example, an antibody molecule can be functionally linked (by chemical coupling, genetic fusion, noncovalent association or otherwise) to one or more other molecular entities, such as another antibody (e.g., a bispecific antibody or a diabody), a detectable agent, a cytotoxic agent, a pharmaceutical agent, and/or a protein or peptide that can mediate association of the antibody or antibody portion with another molecule (such as a streptavidin core region or a polyhistidine tag).

[0367] One type of derivatized antibody molecule is produced by crosslinking two or more antibodies (of the same type or of different types, e.g., to create bispecific antibodies). Suitable crosslinkers include those that are heterobifunctional, having two distinctly reactive groups separated by an appropriate spacer (e.g., m-maleimidobenzoyl-N-hydroxysuccinimide ester) or homobifunctional (e.g., disuccinimidyl suberate). Such linkers are available from Pierce Chemical Company, Rockford, Ill.

### Antibody Molecules Targeting CSF1R

[0368] In some embodiments, provided herein are antibody molecules (e.g., monospecific or multispecific antibody molecules) that bind to CSF1R, e.g., human CSF1R.

[0369] In some embodiments, the anti-CSF1R antibody molecule comprises one, two, or three heavy chain CDRs (e.g., HCDR1, HCDR2, and/or HCDR3) disclosed in Table 13, e.g., in one row of Table 13, or an amino acid sequence comprising no more than 1, 2, 3, 4, 5, or 6 modifications. In some embodiments, the anti-CSF1R antibody molecule comprises one, two, or three heavy chain CDRs (e.g., HCDR1, HCDR2, and/or HCDR3) from a heavy chain variable region (VH) disclosed in Table 15, e.g., optionally wherein the CDRs are according to the Kabat, Chothia, or IMGT definition. In some embodiments, the anti-CSF1R antibody molecule comprises one, two, three, or four heavy chain framework regions (e.g., heavy chain FR1, FR2, FR3, and/or FR4) disclosed in Table 13, e.g., in one row of Table 13, or an amino acid sequence comprising no more than 1, 2, 3, 4, 5, or 6 modifications. In some embodiments, the anti-CSF1R antibody molecule comprises one, two, three, or four heavy chain framework regions (e.g., heavy chain FR1, FR2, FR3, and/or FR4) from a VH disclosed in Table 15. In some embodiments, the anti-CSF1R antibody molecule comprises a VH disclosed in Table 15, or an amino acid sequence having at least 90, 91, 92, 93, 94, 95, 96, 97, 98, or 99% identity thereto.

[0370] In some embodiments, the anti-CSF1R antibody molecule comprises one, two, or three light chain CDRs (e.g., LCDR1, LCDR2, and/or LCDR3) disclosed in Table 14, e.g., in one row of Table 14, or an amino acid sequence comprising no more than 1, 2, 3, 4, 5, or 6 modifications. In some embodiments, the anti-CSF1R antibody molecule comprises one, two, or three light chain CDRs (e.g., LCDR1, LCDR2, and/or LCDR3) from a light chain variable region (VL) disclosed in Table 16, e.g., optionally wherein the CDRs are according to the Kabat, Chothia, or IMGT definition. In some embodiments, the anti-CSF1R antibody molecule comprises one, two, three, or four light chain framework regions (e.g., light chain FR1, FR2, FR3, and/or FR4) disclosed in Table 14, e.g., in one row of Table 14, or an amino acid sequence comprising no more than 1, 2, 3, 4, 5, or 6 modifications. In some embodiments, the anti-CSF1R antibody molecule comprises one, two, three, or four light chain framework regions (e.g., light chain FR1, FR2, FR3, and/or FR4) from a VL disclosed in Table 16. In some embodiments, the anti-CSF1R antibody molecule comprises a VL disclosed in Table 16, or an amino acid sequence having at least 90, 91, 92, 93, 94, 95, 96, 97, 98, or 99% identity thereto.

[0371] In some embodiments, the anti-CSF1R antibody molecule comprises a VH encoded by a nucleotide sequence disclosed in Table 15 (or a nucleotide sequence having at least 80, 85, 90, or 95% identity thereto), and/or a VL encoded by a nucleotide sequence disclosed in Table 16 (or a nucleotide sequence having at least 80, 85, 90, or 95% identity thereto).

TABLE 13
CDRs and framework regions (FR) of exemplary heavy chain
variable regions of anti-CSF1R antibody molecules.

| VH (SEQ | | | | | | | |
|---|---|---|---|---|---|---|---|
| ID NO) | FR 1 | HCDR 1 | FR 2 | HCDR 2 | FR 3 | HCDR 3 | FR 4 |
| aCSF1R | EVQLVES | GFTFSND | WIRQAP | YISSRSS | RFTISRDNAR | GVDGD | WGQGTL |
| BI117 VH | GGGLVQP | EMN | GKGLEW | TIYYADA | NSLYLQMNSL | FSFDY | VTVSS |
| (SEQ ID | GGSLRLS | (SEQ ID | VS | VKG | RAEDTAVYYC | (SEQ | (SEQ |
| NO: 323) | CAAS | NO: 402) | (SEQ | (SEQ ID | AR (SEQ ID | ID NO: | ID NO: |
| | (SEQ ID | | ID NO: | NO: 404) | NO: 428) | 413) | 430) |
| | NO: 424) | | 426) | | | | |
| aCSF1R | EVQLVES | GFTFSND | WIRQAP | YISSGSS | RFTISRDNAR | GVDGD | WGQGTL |
| BI117 C5- | GGGLVQP | EMN | GKGLEW | TIYYADA | NSLYLQMNSL | FSFDY | VTVSS |
| R2A VH | GGSLRLS | (SEQ ID | VS | VKG | RAEDTAVYYC | (SEQ | (SEQ |
| (SEQ ID | CAAS | NO: 402) | (SEQ | (SEQ ID | AR (SEQ ID | ID NO: | ID NO: |
| NO: 324) | (SEQ ID | | ID NO: | NO: 405) | NO: 428) | 413) | 430) |
| | NO: 424) | | 426) | | | | |
| aCSF1R | EVQLVES | GFTFSND | WIRQAP | FISGGSS | RFTISRDNAR | GVDGD | WGQGTL |
| BI117 C9- | GGGLVQP | EMN | GKGLEW | TIYYADA | NSLYLQMNSL | FSFDY | VTVSS |
| R2A VH | GGSLRLS | (SEQ ID | VS | VKG | RAEDTAVYYC | (SEQ | (SEQ |
| (SEQ ID | CAAS | NO: 402) | (SEQ | (SEQ ID | AR (SEQ ID | ID NO: | ID NO: |
| NO: 325) | (SEQ ID | | ID NO: | NO: 406) | NO: 428) | 413) | 430) |
| | NO: 424) | | 426) | | | | |
| aCSF1R | EVQLVES | GFTFSND | WIRQAP | YISSRSS | RFTISRDNAR | NSDED | WGQGTL |
| BI117 D1- | GGGLVQP | EMN | GKGLEW | TIYYADA | NSLYLQMNSL | GSFDY | VTVSS |
| R2A VH | GGSLRLS | (SEQ ID | VS | VKG | RAEDTAVYYC | (SEQ | (SEQ |
| (SEQ ID | CAAS | NO: 402) | (SEQ | (SEQ ID | AR (SEQ ID | ID NO: | ID NO: |
| NO: 326) | (SEQ ID) | | ID NO: | NO: 404) | NO: 428) | 414) | 430) |
| | NO: 424 | | 426) | | | | |
| aCSF1R | EVQLVES | GFTFSND | WIRQAP | YITSKSS | RFTISRDNAR | GVDGD | WGQGTL |
| BI117 E2- | GGGLVQP | EMN | GKGLEW | TIYYADS | NSLYLQMNSL | FSFDY | VTVSS |
| R2B VH | GGSLRLS | (SEQ ID | VS | VKG | RAEDTAVYYC | (SEQ | (SEQ |
| (SEQ ID | CAAS | NO: 402) | (SEQ | (SEQ ID | AR (SEQ ID | ID NO: | ID NO: |
| NO: 327) | (SEQ ID | | ID NO: | NO: 407) | NO: 428) | 413) | 430) |
| | NO: 424) | | 426) | | | | |
| aCSF1R | EVQLVES | GFTFSND | WIRQAP | YISSRSS | RFTISRDNAR | GVDGD | WGQGTL |
| BI117 G1- | GGGLVQP | EMN | GKGLEW | TIYYADA | NSLYLQMNSL | FSFDV | VTVSS |
| TUB VH | GGSLRLS | (SEQ ID | VS | VKG | RAEDTAVYYC | (SEQ | (SEQ |
| (SEQ ID | CAAS | NO: 402) | (SEQ | (SEQ ID | AR (SEQ ID | ID NO: | ID NO: |
| NO: 328) | (SEQ ID | | ID NO: | NO: 404) | NO: 428) | 415) | 430) |
| | NO: 424) | | 426) | | | | |
| aCSF1R | EVQLVES | GFTFSND | WIRQAP | YITSKSS | RFTISRDNAR | GVDGD | WGQGTL |
| BI117 G12- | GGGLVQP | EMN | GKGLEW | TIYYADA | NSLYLQMNSL | FSFDY | VTVSS |
| TUB VH | GGSLRLS | (SEQ ID | VS | VKG | RAEDTAVYYC | (SEQ | (SEQ |
| (SEQ ID | CAAS | NO: 402) | (SEQ | (SEQ ID | AR (SEQ ID | ID NO: | ID NO: |
| NO: 329) | (SEQ ID | | ID NO: | NO: 408) | NO: 428) | 413) | 430) |
| | NO: 424) | | 426) | | | | |
| aCSF1R | EVQLVES | GFTFSND | WIRQAP | YISSRSS | RFTISRDNAR | SVDGD | WGQGTL |
| BI117 D6- | GGGLVQP | EMN | GKGLEW | TIYYADA | NSLYLQMNSL | GSFDY | VTVSS |
| R3B VH | GGSLRLS | (SEQ ID | VS | VKG | RAEDTAVYYC | (SEQ | (SEQ |
| (SEQ ID | CAAS | NO: 402) | (SEQ | (SEQ ID | AR (SEQ ID | ID NO: | ID NO: |
| NO: 330) | (SEQ ID | | ID NO: | NO: 404) | NO: 428) | 416) | 430) |
| | NO: 424) | | 426) | | | | |
| aCSF1R | EVQLVES | GFTFSND | WIRQAP | YISSRSS | RFTISRDNAR | SSDGS | WGQGTL |
| BI117 A6- | GGGLVQP | EMN | GKGLEW | TIYYADA | NSLYLQMNSL | TSFDY | VTVSS |
| R3B VH | GGSLRLS | (SEQ ID | VS | VKG | RAEDTAVYYC | (SEQ | (SEQ |
| (SEQ ID | CAAS | NO: 402) | (SEQ | (SEQ ID | AR (SEQ ID | ID NO: | ID NO: |
| NO: 331) | (SEQ ID | | ID NO: | NO: 404) | NO: 428) | 417) | 430) |
| | NO: 424) | | 426) | | | | |
| aCSF1R | EVQLVES | GFTFSND | WIRQAP | YISSSSS | RFTISRDNAR | GVDGD | WGQGTL |
| BI117 A11- | GGGLVQP | EMN | GKGLEW | TIYYADA | NSLYLQMNSL | FSFDY | VTVSS |
| R3B VH | GGSLRLS | (SEQ ID | VS | VTG | RAEDTAVYYC | (SEQ | (SEQ |
| (SEQ ID | CAAS | NO: 402) | (SEQ | (SEQ ID | AR (SEQ ID | ID NO: | ID NO: |
| NO: 332) | (SEQ ID | | ID NO: | NO: 409) | NO: 428) | 413) | 430) |
| | NO: 424) | | 426) | | | | |
| aCSF1R | EVQLVES | GFTFSND | WIRQAP | YISSRSS | RFTISRDNAR | NSDSD | WGQGTL |
| BI117 B2- | GGGLVQP | EMN | GKGLEW | TIYYADA | NSLYLQMNSL | GSFDI | VTVSS |
| R3B VH | GGSLRLS | (SEQ ID | VS | VKG | RAEDTAVYYC | (SEQ | (SEQ |
| (SEQ ID | CAAS | NO: 402) | (SEQ | (SEQ ID | AR (SEQ ID | ID NO: | ID NO: |
| NO: 333) | (SEQ ID | | ID NO: | NO: 404) | NO: 428) | 418) | 430) |
| | NO: 424) | | 426) | | | | |
| aCSF1R | EVQLVES | GFTFSND | WIRQAP | YISSRSS | RFTISRDNAR | GVDGD | WGQGTL |
| BI117 C5- | GGGLVQP | EMN | GKGLEW | TIYYADA | NSLYLQMNSL | FSFDF | VTVSS |
| R3B VH | GGSLRLS | (SEQ ID | VS | VKG | RAEDTAVYYC | (SEQ | (SEQ |
| (SEQ ID | CAAS | NO: 402) | (SEQ | (SEQ ID | AR (SEQ ID | ID NO: | ID NO: |
| NO: 334) | (SEQ ID | | ID NO: | NO: 404) | NO: 428) | 419) | 430) |
| | NO: 424) | | 426) | | | | |
| aCSF1R | EVQLVES | GFTFSND | WIRQAP | YISSRSS | RFTISRDNAR | SGRLD | WGQGTL |
| BI117 C6- | GGGLVQP | EMN | GKGLEW | TIYYADA | NSLYLQMNSL | GSFDY | VTVSS |
| R3B VH | GGSLRLS | (SEQ ID | VS | VKG | RAEDTAVYYC | (SEQ | (SEQ |
| (SEQ ID | CAAS | NO: 402) | (SEQ | (SEQ ID | AR (SEQ ID | ID NO: | ID NO: |
| NO: 335) | (SEQ ID | | ID NO: | NO: 404) | NO: 428) | 420) | 430) |
| | NO: 424) | | 426) | | | | |
| aCSF1R | EVQLVES | GFTFSND | WIRQAP | YISSRSS | RFTISRDNAR | GVESD | WGQGTL |
| BI117 D11- | GGGLVQP | EMN | GKGLEW | TIYYADA | NSLYLQMNSL | FSFDY | VTVSS |
| R3B VH | GGSLRLS | (SEQ ID | VS | VKG | RAEDTAVYYC | (SEQ | (SEQ |
| (SEQ ID | CAAS | NO: 402) | (SEQ | (SEQ ID | AR (SEQ ID | ID NO: | ID NO: |
| NO: 336) | (SEQ ID | | ID NO: | NO: 404) | NO: 428) | 421) | 430) |
| | NO: 424) | | 426) | | | | |
| aCSF1R | QVQLVQS | GFTFSSY | WVRQAP | VISYDGS | RFTISRDNSK | ELDYG | WGKGTT |
| BI123 VH | GGGVVQP | AMB | GKGLEW | NKYYADS | NTLYLQMNSL | DYGLD | VTVSS |
| (SEQ ID | GRSLRLS | (SEQ ID | VA | VKG | RAEDTAVYYC | V(SEQ | (SEQ |
| NO: 337) | CAAS | NO: 403) | (SEQ | (SEQ ID | AR (SEQ ID | IDNO: | ID NO: |
| | (SEQ ID | | ID NO: | NO: 410) | NO: 429) | 422) | 431) |
| | NO: 425) | | 427) | | | | |
| aCSF1R | QVQLVQS | GFTFSSY | WVRQAP | VISYDGS | RFTISRDNSK | ELDYG | WGKGTT |
| BI123 A5- | GGGVVQP | AMH | GKGLEW | NKYYADS | NTLYLQMNSL | DWGLD | VTVSS |
| R3B VH | GRSLRLS | (SEQ ID | VA | VKG | RAEDTAVYYC | V | (SEQ |
| (SEQ ID | CAAS | NO: 403) | (SEQ | (SEQ ID | AR (SEQ ID | (SEQ | ID NO: |
| NO: 338) | (SEQ ID | | ID NO: | NO: 410) | NO: 429) | ID NO: | 431) |
| | NO: 425) | | 427) | | | 423) | |
| aCSF1R | QVQLVQS | GFTFSSY | WVRQAP | VIPYYGS | RFTISRDNSK | ELDYG | WGKGTT |
| BI123 B6- | GGGVVQP | AMH | GKGLEW | NKYYADS | NTLYLQMNSL | DYGLD | VTVSS |
| R3B VH | GRSLRLS | (SEQ ID | VA | VKG | RAEDTAVYYC | V | (SEQ |
| (SEQ ID | CAAS | NO: 403) | (SEQ | (SEQ ID | AR (SEQ ID | (SEQ | ID NO: |
| NO: 339) | (SEQ ID | | ID NO: | NO: 411) | NO: 429) | ID NO: | 431) |
| | NO: 425) | | 427) | | | 422) | |
| aCSF1R | QVQLVQS | GFTFSSY | WVRQAP | VISYDGS | RFTISRDNSK | ELDYG | WGKGTT |
| BI123 C1- | GGGVVQP | AMH | GKGLEW | DKYYADS | NTLYLQMNSL | DYGLD | VTVSS |
| R3B VH | GRSLRLS | (SEQ ID | VA | VKG | RAEDTAVYYC | V | (SEQ |
| (SEQ ID | CAAS | NO: 403) | (SEQ | (SEQ ID | AR (SEQ ID | (SEQ | ID NO: |
| NO: 340) | (SEQ ID | | ID NO: | NO: 412) | NO: 429) | ID NO: | 431) |
| | NO: 425) | | 427) | | | 422) | |

TABLE 29
Consensus CDRs of exemplary heavy chain variable regions of
anti-CSF1R antibody molecules.

| Description | HCDR 1 | HCDR 2 | HCDR 3 |
|---|---|---|---|
| BI117 | GFTFSNDE | X₁IX₂X₃X₄₅STIYYADX₅VX₆G, | X₁X₂X₃X₄X₅X₆SFDX₇, wherein |
| consensus | MN (SEQ | wherein X₁ is Y or F; X₂ | X₁ is G, N, or S; X₂ is V, S, or |
| CDRs #1 | ID NO: | is S or T; X₃ is S or G; X₄ is | G; X₃ is D, E, or R; X₄ is G, S, |
| | 402) | R, K, G, or S; X₅ is A or S; | E, or L; X₅ is D or S; X₆ is F, |
| | | and X₆ is K or T (SEQ ID | G, or T; and X₇ is Y, V, F, or I |
| | | NO: 474) | (SEQ ID NO: 475) |
| BI117 | GFTFSNDE | X₁ISX₂X₃SSTIYYADAVKG, | X₁X₂DX₃DX₄SFDY, wherein X₁ |
| consensus | MN (SEQ | wherein X₁ is Y or F; X₂ is S | is G or N; X₂ is V or S; X₃ is G |
| CDRs #2 | ID NO: | or G; and X₃ is G or R (SEQ | or E; and X₄ is F or G (SEQ ID |
| | 402) | ID NO: 476) | NO: 477) |
| BI123 | GFTFSSYA | VIX₁YX₂GSX₃KYYADSVK | ELDYGDXGLDV, wherein X is Y or W |
| consensus | MH (SEQ | G, wherein X₁ is S or P; X₂ is | (SEQ ID NO: SEQ ID NO: 479) |
| CDRs | ID NO: | D or Y; and X₃ is N or D | |
| | 403) | (SEQ ID NO: 478) | |

TABLE 14
CDRs and framework regions (FR) of exemplary light chain
variable regions of anti-CSF1R antibody molecules.

| VL | FR 1 | LCDR 1 | FR 2 | LCDR 2 | FR 3 | LCDR 3 | FR 4 |
|---|---|---|---|---|---|---|---|
| aCSF1R | QLVLTQPPS | TGSSSNIG | WYQQLPG | GNSNRPS | GVPDRFSGSK | QSYDSS | FGGGTK |
| BI117 VL | VSGAPGQRV | AGYDVH | TAPKLLI | (SEQ | SGTSASLAIT | LSEEV | LTVL |
| (SEQ ID | TISC (SEQ | (SEQ ID | Y (SEQ | ID NO: | GLQAEDEADY | (SEQ | (SEQ |
| NO: 341) | ID NO: | NO: 432) | ID NO: | 434) | YC (SEQ ID | ID NO: | ID NO: |
| | 438) | | 440) | | NO: 442) | 436) | 444) |
| aCSF1R | SLVLTQPPS | GGNNIGSK | WYQQKPG | DDSDRPS | GIPERFSGSN | QVWDSS | FGGGTQ |
| BI123 VL | VSVAPGKTA | SVH (SEQ | QAPVLVV | (SEQ | SGNTATLTIS | SDHVV | LTVL |
| (SEQ ID | RITC (SEQ | ID NO: | Y (SEQ | ID NO: | RVEAGDEADY | (SEQ | (SEQ |
| NO: 342) | ID NO: | 433) | ID NO: | 435) | YC (SEQ ID | ID NO: | ID NO: |
| | 439) | | 441) | | NO: 443) | 437) | 445) |

TABLE 15
Amino acid and nucleotide sequences of exemplary heavy chain
variable regions of anti-CSF1R antibody molecules.

| SEQ ID NO | Description | Sequence |
|---|---|---|
| SEQ ID NO: | aCSF1R | EVQLVESGGGLVQPGGSLRLSCAASGFTFSNDEMNWIRQAPGKGLEWVS |
| 323 | BI117 VH | YISSRSSTIYYADAVKGRFTISRDNARNSLYLQMNSLRAEDTAVYYCAR |
| | aa | GVDGDFSFDYWGQGTLVTVSS |
| SEQ ID NO: | aCSF1R | EVQLVESGGGLVQPGGSLRLSCAASGFTFSNDEMNWIRQAPGKGLEWVS |
| 324 | BI117 C5- | YISSGSSTIYYADAVKGRFTISRDNARNSLYLQMNSLRAEDTAVYYCAR |
| | R2A VH aa | GVDGDFSFDYWGQGTLVTVSS |
| SEQ ID NO: | aCSF1R | EVQLVESGGGLVQPGGSLRLSCAASGFTFSNDEMNWIRQAPGKGLEWVS |
| 325 | BI117 C9- | FISGGSSTIYYADAVKGRFTISRDNARNSLYLQMNSLRAEDTAVYYCAR |
| | R2A VH aa | GVDGDFSFDYWGQGTLVTVSS |
| SEQ ID NO: | aCSF1R | EVQLVESGGGLVQPGGSLRLSCAASGFTFSNDEMNWIRQAPGKGLEWVS |
| 326 | BI117 D1- | YISSRSSTIYYADAVKGRFTISRDNARNSLYLQMNSLRAEDTAVYYCAR |
| | R2A VH aa | NSDEDGSFDYWGQGTLVTVSS |
| SEQ ID NO: | aCSF1R | EVQLVESGGGLVQPGGSLRLSCAASGFTFSNDEMNWIRQAPGKGLEWVS |
| 327 | BI117 E2- | YITSKSSTIYYADSVKGRFTISRDNARNSLYLQMNSLRAEDTAVYYCAR |
| | R2B VH aa | GVDGDFSFDYWGQGTLVTVSS |
| SEQ ID NO: | aCSF1R | EVQLVESGGGLVQPGGSLRLSCAASGFTFSNDEMNWIRQAPGKGLEWVS |
| 328 | BI117 G1- | YISSRSSTIYYADAVKGRFTISRDNARNSLYLQMNSLRAEDTAVYYCAR |
| | R2B VH aa | GVDGDFSFDVWGQGTLVTVSS |
| SEQ ID NO: | aCSF1R | EVQLVESGGGLVQPGGSLRLSCAASGFTFSNDEMNWIRQAPGKGLEWVS |
| 329 | BI117 G12- | YITSKSSTIYYADAVKGRFTISRDNARNSLYLQMNSLRAEDTAVYYCAR |
| | R2B VH aa | GVDGDFSFDYWGQGTLVTVSS |
| SEQ ID NO: | aCSF1R | EVQLVESGGGLVQPGGSLRLSCAASGFTFSNDEMNWIRQAPGKGLEWVS |
| 330 | BI117 D6- | YISSRSSTIYYADAVKGRFTISRDNARNSLYLQMNSLRAEDTAVYYCAR |
| | R3B VH aa | SVDGDGSFDYWGQGTLVTVSS |
| SEQ ID NO: | aCSF1R | EVQLVESGGGLVQPGGSLRLSCAASGFTFSNDEMNWIRQAPGKGLEWVS |
| 331 | BI117 A6- | YISSRSSTIYYADAVKGRFTISRDNARNSLYLQMNSLRAEDTAVYYCAR |
| | R3B VH aa | SSDGSTSFDYWGQGTLVTVSS |
| SEQ ID NO: | aCSF1R | EVQLVESGGGLVQPGGSLRLSCAASGFTFSNDEMNWIRQAPGKGLEWVS |
| 332 | BI117 A11- | YISSSSSTIYYADAVTGRFTISRDNARNSLYLQMNSLRAEDTAVYYCAR |
| | R3B VH aa | GVDGDFSFDYWGQGTLVTVSS |
| SEQ ID NO: | aCSF1R | EVQLVESGGGLVQPGGSLRLSCAASGFTFSNDEMNWIRQAPGKGLEWVS |
| 333 | BI117 B2- | YISSRSSTIYYADAVKGRFTISRDNARNSLYLQMNSLRAEDTAVYYCAR |
| | R3B VH aa | NSDSDGSFDIWGQGTLVTVSS |
| SEQ ID NO: | aCSF1R | EVQLVESGGGLVQPGGSLRLSCAASGFTFSNDEMNWIRQAPGKGLEWVS |
| 334 | BI117 C5- | YISSRSSTIYYADAVKGRFTISRDNARNSLYLQMNSLRAEDTAVYYCAR |
| | R3B VH aa | GVDGDFSFDFWGQGTLVTVSS |
| SEQ ID NO: | aCSF1R | EVQLVESGGGLVQPGGSLRLSCAASGFTFSNDEMNWIRQAPGKGLEWVS |
| 335 | BI117 C6- | YISSRSSTIYYADAVKGRFTISRDNARNSLYLQMNSLRAEDTAVYYCAR |
| | R3B VH aa | SGRLDGSFDYWGQGTLVTVSS |
| SEQ ID NO: | aCSF1R | EVQLVESGGGLVQPGGSLRLSCAASGFTFSNDEMNWIRQAPGKGLEWVS |
| 336 | BI117 D11- | YISSRSSTIYYADAVKGRFTISRDNARNSLYLQMNSLRAEDTAVYYCAR |
| | R3B VH aa | GVESDFSFDYWGQGTLVTVSS |
| SEQ ID NO: | aCSF1R | QVQLVQSGGGVVQPGRSLRLSCAASGFTFSSYAMHWVRQAPGKGLEWVA |
| 337 | BI123 VH | VISYDGSNKYYADSVKGRFTISRDNSKNTLYLQMNSLRAEDTAVYYCAR |
| | aa | ELDYGDYGLDVWGKGTTVTVSS |
| SEQ ID NO: | aCSF1R | QVQLVQSGGGVVQPGRSLRLSCAASGFTFSSYAMHWVRQAPGKGLEWVA |
| 338 | BI123 A5- | VISYDGSNKYYADSVKGRFTISRDNSKNTLYLQMNSLRAEDTAVYYCAR |
| | R3B VH aa | ELDYGDWGLDVWGKGTTVTVSS |
| SEQ ID NO: | aCSF1R | QVQLVQSGGGVVQPGRSLRLSCAASGFTFSSYAMHWVRQAPGKGLEWVA |
| 339 | BI123 B6- | VIPYYGSNKYYADSVKGRFTISRDNSKNTLYLQMNSLRAEDTAVYYCAR |
| | R3B VH aa | ELDYGDYGLDVWGKGTTVTVSS |
| SEQ ID NO: | aCSF1R | QVQLVQSGGGVVQPGRSLRLSCAASGFTFSSYAMHWVRQAPGKGLEWVA |
| 340 | BI123 C1- | VISYDGSDKYYADSVKGRFTISRDNSKNTLYLQMNSLRAEDTAVYYCAR |
| | R3B VH aa | ELDYGDYGLDVWGKGTTVTVSS |
| SEQ ID NO: | aCSF1R | GAAGTGCAGCTGGTCGAAAGCGGAGGGGGTCTGGTCCAGCCTGGAGGGT |
| 250 | BI117 VH | CCCTGCGGCTGTCCTGCGCCGCTTCCGGCTTCACCTTCTCCAACGATGA |
| | nt | AATGAACTGGATCCGCCAAGCCCCTGGAAAGGGCCTGGAATGGGTGTCG |
| | | TACATCTCGAGCAGGTCCAGCACTATCTACTATGCCGACGCGGTGAAGG |
| | | GACGCTTCACTATCAGCCGCGATAACGCACGCAATTCCCTCTACCTGCA |
| | | GATGAACTCGCTCAGAGCTGAGGATACTGCCGTCTACTACTGCGCCCGC |
| | | GGCGTGGACGGCGATTTTTCCTTCGATTACTGGGGACAGGGCACTCTTG |
| | | TCACCGTGTCAAGC |
| SEQ ID NO: | aCSF1R | GAAGTCCAACTCGTGGAAAGCGGCGGTGGCCTGGTGCAGCCGGGAGGCT |
| 251 | BI117 C5- | CCCTCCGGCTGTCGTGTGCAGCCAGCGGGTTCACCTTCTCCAACGACGA |
| | R2A VH nt | AATGAACTGGATTCGCCAGGCGCCGGGAAAGGGGCTGGAATGGGTGTCG |
| | | TACATTTCAAGCGGGTCCTCCACCATTTACTACGCCGATGCAGTCAAGG |
| | | GCCGCTTCACCATCTCGCGCGACAACGCTCGGAACTCCCTCTATCTGCA |
| | | GATGAACAGCCTGAGAGCGGAAGACACCGCCGTCTACTACTGCGCCCGC |
| | | GGAGTGGACGGCGACTTCTCCTTCGACTACTGGGGTCAGGGAACCCTGG |
| | | TGACTGTGTCCTCA |
| SEQ ID NO: | aCSF1R | GAGGTGCAGCTGGTGGAATCGGGGGGTGGCCTCGTGCAGCCCGGAGGGT |
| 252 | BI117 C9- | CGCTCCGGCTGTCCTGTGCCGCTAGCGGATTCACATTCTCGAATGACGA |
| | R2A VH nt | GATGAACTGGATTCGGCAGGCCCCAGGCAAGGGCCTGGAATGGGTGAGC |
| | | TTCATTTCGGGCGGGTCCTCAACCATCTACTACGCCGACGCCGTCAAGG |
| | | GGCGCTTTACTATCTCCCGCGACAATGCACGGAACTCCCTCTACCTGCA |
| | | AATGAACAGCCTGAGGGCGGAAGATACAGCTGTGTACTACTGCGCCCGG |
| | | GGCGTGGACGGAGACTTCTCCTTCGACTACTGGGGTCAGGGAACCCTGG |
| | | TGACAGTGTCTTCC |
| SEQ ID NO: | aCSF1R | GAAGTGCAGCTCGTGGAGTCTGGAGGTGGTCTGGTGCAGCCGGGTGGTT |
| 253 | BI117 D1- | CCCTGAGGCTGTCCTGCGCCGCCAGCGGCTTCACCTTCTCAAATGACGA |
| | R2A VH nt | AATGAACTGGATTCGGCAGGCCCCTGGCAAGGGCCTGGAGTGGGTGTCG |
| | | TACATCTCCTCCCGCAGCTCCACCATCTACTACGCCGACGCAGTCAAGG |
| | | GGAGGTTCACCATCTCCCGGGACAACGCCCGGAACTCACTGTACCTGCA |
| | | GATGAACTCCCTGAGAGCTGAGGACACTGCCGTCTACTACTGCGCTAGA |
| | | AACTCCGATGAGGACGGAAGCTTCGACTACTGGGGCCAGGGAACTCTGG |
| | | TGACAGTCTCGAGC |
| SEQ ID NO: | aCSF1R | GAGGTGCAGCTCGTGGAAAGCGGGGGCGGCCTGGTCCAGCCTGGAGGAT |
| 254 | BI117 E2- | CCCTGAGACTTTCCTGTGCTGCTTCCGGGTTCACCTTCAGCAATGATGA |
| | R2B VH nt | GATGAACTGGATTCGGCAAGCCCCGGGCAAGGGCCTGGAATGGGTCAGC |
| | | TACATCACGTCTAAGTCCTCCACCATCTACTATGCCGACTCCGTGAAGG |
| | | GACGCTTTACCATCTCACGCGACAACGCGCGGAACAGCCTTTACCTGCA |
| | | GATGAACTCACTGCGCGCCGAAGATACCGCCGTGTACTACTGCGCTCGC |
| | | GGAGTGGATGGAGATTTTTCCTTCGATTACTGGGGACAAGGCACCCTGG |
| | | TGACCGTCAGCTCC |
| SEQ ID NO: | aCSF1R | GAAGTCCAGCTCGTCGAATCTGGTGGGGGACTGGTCCAGCCGGGAGGAT |
| 255 | BI117 G1- | CCCTCCGGCTGTCGTGCGCGGCATCCGGGTTCACCTTCTCCAACGATGA |
| | R23 VH nt | GATGAATTGGATTCGCCAGGCCCCAGGAAAGGGGCTGGAGTGGGTCTCG |
| | | TACATCTCATCCCGCAGCTCTACTATCTACTACGCCGATGCTGTCAAGG |
| | | GCCGGTTCACTATCTCCCGCGATAACGCCCGGAACTCCCTCTACCTCCA |
| | | GATGAACTCACTGCGCGCGGAAGACACCGCCGTCTACTACTGCGCACGG |
| | | GGCGTCGATGGAGATTTCTCCTTCGATGTGTGGGGTCAGGGAACACTGG |
| | | TGACCGTGTCCTCC |
| SEQ ID NO: | aCSF1R | GAGGTGCAGCTCGTGGAGTCCGGTGGAGGACTGGTGCAGCCCGGCGGAT |
| 256 | BI117 G12- | CGCTGAGACTGTCTTGCGCCGCCTCGGGATTCACGTTCTCCAACGATGA |
| | R23 VH nt | AATGAACTGGATTAGACAGGCTCCGGGCAAGGGCCTGGAATGGGTGTCC |
| | | TACATTACTTCGAAGTCCTCCACCATTTACTACGCAGACGCCGTGAAGG |
| | | GCCGCTTCACCATTTCCCGCGACAACGCAAGAAACTCGCTGTACCTGCA |
| | | GATGAACTCCCTGCGCGCGGAGGACACCGCCGTGTACTACTGTGCCAGA |
| | | GGAGTCGATGGCGATTTCTCGTTCGACTACTGGGGACAGGGCACTCTTG |
| | | TGACTGTCTCCTCC |
| SEQ ID NO: | aCSF1R | GAGGTCCAGCTGGTCGAATCGGGGGGAGGCCTCGTGCAGCCTGGAGGGT |
| 257 | BI117 D6- | CCCTCCGGCTTTCCTGTGCCGCTTCCGGATTCACCTTCAGCAACGATGA |
| | R3B VH nt | GATGAACTGGATCAGGCAGGCCCCGGGAAAGGGGCTCGAGTGGGTGTCC |
| | | TACATCTCCAGCCGGTCCTCGACCATCTACTACGCCGATGCCGTGAAGG |
| | | GGAGATTTACTATCTCCCGCGACAATGCACGGAACTCACTGTACCTCCA |
| | | GATGAACTCACTGCGGGCCGAGGACACCGCAGTGTACTACTGCGCGCGG |
| | | TCCGTGGATGGCGACGGGAGCTTCGATTACTGGGGACAGGGGACCCTGG |
| | | TGACCGTGTCGTCC |
| SEQ ID NO: | aCSF1R | GAGGTGCAGCTCGTGGAATCCGGAGGTGGACTGGTGCAGCCGGGGGGTA |
| 258 | BI117 A6- | GCCTGCGGCTGTCCTGTGCAGCTTCCGGGTTCACCTTCTCCAACGACGA |
| | R3B VH nt | AATGAACTGGATCCGCCAGGCCCCGGGCAAGGGACTCGAATGGGTGTCC |
| | | TACATCTCCTCCCGCTCCTCCACTATCTACTATGCCGATGCCGTCAAGG |
| | | GCCGCTTCACCATTTCTCGCGACAACGCCCGGAACTCCCTGTACCTCCA |
| | | GATGAACTCCCTGCGCGCCGAGGACACTGCCGTCTACTACTGCGCGAGG |
| | | TCGTCCGACGGATCCACCTCCTTCGACTACTGGGGGCAAGGAACTCTCG |
| | | TGACCGTGTCCTCC |
| SEQ ID NO: | aCSF1R | GAAGTGCAACTTGTCGAAAGTGGTGGGGGCCTGGTGCAGCCTGGGGGCT |
| 259 | BI117 A11- | CCCTGCGGCTGTCCTGCGCCGCCTCCGGATTCACTTTCTCCAACGACGA |
| | R3B VH nt | GATGAACTGGATTAGACAGGCTCCTGGAAAGGGTCTCGAATGGGTGTCC |
| | | TACATTAGCTCATCTTCCAGCACCATCTACTACGCCGACGCAGTGACCG |
| | | GAAGGTTCACCATCTCGAGGGACAACGCCCGCAACTCCCTCTACCTGCA |
| | | GATGAACTCGCTGCGCGCGGAGGACACCGCTGTGTACTACTGCGCCCGC |
| | | GGCGTGGACGGAGACTTCTCCTTCGACTACTGGGGACAGGGAACTCTTG |
| | | TGACCGTGAGCAGC |
| SEQ ID NO: | aCSF1R | GAAGTGCAACTGGTGGAATCGGGAGGCGGCCTGGTGCAACCTGGCGGTA |
| 260 | BI117 B2- | GCCTGCGGCTGAGCTGCGCCGCCTCAGGCTTCACCTTTTCCAACGACGA |
| | R3B VH nt | AATGAACTGGATCAGACAGGCGCCTGGCAAAGGACTGGAGTGGGTGTCC |
| | | TACATCTCGTCCAGGTCAAGCACCATTTATTACGCGGACGCCGTGAAAG |
| | | GGAGATTCACCATCAGCAGAGACAACGCCCGGAACTCCCTCTACCTGCA |
| | | GATGAACTCCCTGAGGGCCGAGGACACCGCAGTGTACTACTGTGCCAGA |
| | | AACTCCGACTCCGATGGAAGCTTCGACATCTGGGGACAGGGGACCCTGG |
| | | TGACTGTGTCGTCC |
| SEQ ID NO: | aCSF1R | GAAGTGCAGCTGGTCGAATCGGGGGGAGGACTGGTCCAGCCTGGAGGGT |
| 261 | BI117 C5- | CCCTCCGCCTGAGCTGCGCCGCCTCCGGATTCACCTTTTCCAACGACGA |
| | R3B VH nt | GATGAACTGGATCAGGCAGGCCCCGGGCAAGGGGCTGGAATGGGTGTCA |
| | | TACATCTCCAGCCGCTCATCGACAATTTACTACGCCGATGCCGTGAAGG |
| | | GTAGATTTACCATCTCCCGGGACAATGCCCGAAACAGCCTGTATCTGCA |
| | | AATGAACTCCCTGCGGGCGGAGGATACCGCTGTCTACTACTGTGCCAGA |
| | | GGCGTGGATGGGGACTTCAGCTTTGACTTTTGGGGACAGGGCACCCTCG |
| | | TCACCGTGAGCAGC |
| SEQ ID NO: | aCSF1R | GAGGTGCAGCTGGTGGAGTCCGGAGGCGGCCTTGTCCAGCCGGGCGGGT |
| 262 | BI117 C6- | CTCTGCGGCTGTCATGTGCGGCCTCGGGATTCACTTTTTCCAACGACGA |
| | R3B VH nt | AATGAACTGGATCCGCCAGGCCCCTGGGAAGGGGCTTGAATGGGTGAGC |
| | | TACATCTCCTCACGGTCCTCCACTATCTATTACGCCGACGCTGTGAAGG |
| | | GCCGCTTCACTATCTCACGCGACAATGCCAGGAACTCTCTCTACCTGCA |
| | | GATGAACTCCCTGCGGGCCGAAGATACCGCGGTGTACTACTGTGCCCGC |
| | | TCGGGCCGGCTGGACGGGTCATTCGACTACTGGGGACAAGGGACCCTGG |
| | | TCACCGTCTCCTCT |
| SEQ ID NO: | aCSF1R | GAAGTCCAGCTGGTCGAGTCCGGCGGTGGGCTGGTCCAGCCCGGCGGAT |
| 263 | BI117 D11- | CGCTGCGCCTGTCCTGTGCCGCCTCCGGCTTCACCTTCTCCAACGACGA |
| | R3B VH nt | GATGAACTGGATCAGACAGGCCCCCGGTAAGGGACTGGAGTGGGTGAGC |
| | | TACATCTCCTCGCGCAGCTCCACCATCTACTACGCCGACGCCGTGAAGG |
| | | GAAGGTTCACCATCAGCAGAGATAACGCGCGGAACAGCCTGTACCTGCA |
| | | GATGAACTCACTGCGGGCTGAAGACACAGCCGTCTATTACTGTGCCAGA |
| | | GGAGTGGAATCCGATTTCAGCTTCGACTACTGGGGACAAGGAACTCTGG |
| | | TCACGGTCAGCTCC |
| SEQ ID NO: | aCSF1R | CAGGTGCAGCTTGTGCAAAGCGGGGGAGGCGTGGTGCAGCCGGGACGGA |
| 264 | BI123 VH | GCCTGCGGCTGTCGTGCGCCGCGAGCGGTTTCACCTTCTCCTCCTACGC |
| | nt | TATGCACTGGGTCCGCCAGGCGCCGGGCAAGGGCCTCGAATGGGTGGCC |
| | | GTGATCAGCTACGATGGCTCCAACAAGTACTACGCCGACTCAGTGAAGG |
| | | GAAGGTTCACCATCTCAAGAGATAACAGCAAGAACACGCTGTACCTCCA |
| | | GATGAACTCCCTCCGGGCCGAAGACACAGCCGTCTACTACTGTGCGAGA |
| | | GAGCTCGATTACGGCGATTACGGCCTGGACGTGTGGGGCAAGGGAACCA |
| | | CGGTGACCGTCTCCTCC |
| SEQ ID NO: | aCSF1R | CAAGTGCAGCTCGTGCAGTCAGGCGGTGGCGTGGTGCAGCCCGGCCGGT |
| 265 | BI123 A5- | CTCTGAGGCTCAGCTGCGCCGCCTCGGGCTTCACCTTCTCGTCATACGC |
| | R3B VH nt | CATGCACTGGGTGCGCCAGGCCCCCGGGAAGGGACTGGAATGGGTCGCC |
| | | GTGATCTCCTACGATGGATCGAACAAGTACTACGCCGACTCCGTGAAGG |
| | | GGCGGTTCACCATCTCCCGCGACAACTCCAAGAACACCCTTTATCTGCA |
| | | AATGAACTCGCTCAGAGCAGAGGACACCGCTGTGTACTACTGCGCCAGA |
| | | GAGCTGGACTACGGTGATTGGGGACTGGACGTGTGGGGCAAGGGTACCA |
| | | CCGTGACTGTGTCGTCC |
| SEQ ID NO: | aCSF1R | CAAGTGCAACTGGTGCAATCCGGAGGGGGTGTGGTCCAACCGGGACGCA |
| 266 | BI123 B6- | GCCTGCGGCTGTCCTGCGCCGCCAGCGGCTTCACATTCTCCTCCTACGC |
| | R3B VH nt | CATGCACTGGGTCCGCCAGGCGCCAGGTAAGGGACTCGAATGGGTGGCA |
| | | GTGATCCCTTACTACGGATCAAACAAGTATTACGCCGATTCCGTGAAGG |
| | | GCCGCTTCACCATCAGCAGAGACAACTCCAAGAACACCCTCTACCTGCA |
| | | GATGAACTCCCTTCGCGCCGAGGATACCGCCGTCTACTACTGCGCCCGC |
| | | GAGCTGGACTACGGTGACTACGGACTCGATGTGTGGGGAAAGGGTACCA |
| | | CTGTGACCGTGAGCTCC |
| SEQ ID NO: | aCSF1R | CAGGTGCAACTGGTCCAGTCGGGCGGAGGAGTGGTCCAGCCGGGTAGGT |
| 267 | BI123 C1- | CACTGCGGCTGTCATGTGCCGCTAGCGGATTCACTTTCTCTTCCTACGC |
| | R3B VH nt | AATGCACTGGGTGAGACAAGCCCCTGGCAAGGGACTGGAGTGGGTCGCC |
| | | GTGATCTCGTATGACGGGTCCGATAAGTACTACGCTGATTCCGTGAAGG |
| | | GACGCTTCACGATCAGCCGCGACAACTCCAAAAACACTCTCTACCTGCA |
| | | AATGAATTCCCTTCGCGCCGAAGATACTGCAGTGTACTACTGCGCCAGA |
| | | GAGCTGGACTACGGAGACTACGGCCTGGACGTGTGGGGCAAGGGCACCA |
| | | CTGTGACCGTCTCCTCC |

TABLE 16
Amino acid and nucleotide sequences of exemplary light
chain variable regions of anti-CSF1R antibody molecules.

| SEQ ID NO | Description | Sequence |
|---|---|---|
| SEQ ID NO: | aCSF1R BI117 | QLVLTQPPSVSGAPGQRVTISCTGSSSNIGAGYDVHWYQ |
| 341 | VL aa | QLPGTAPKLLIYGNSNRPSGVPDRFSGSKSGTSASLAIT |
| | | GLQAEDEADYYCQSYDSSLSEEVFGGGTKLTVL |
| SEQ ID NO: | aCSF1R BI123 | SLVLTQPPSVSVAPGKTARITCGGNNIGSKSVHWYQQKP |
| 342 | VL aa | GQAPVLVVYDDSDRPSGIPERFSGSNSGNTATLTISRVE |
| | | AGDEADYYCQVWDSSSDHVVFGGGTQLTVL |
| SEQ ID NO: | aCSF1R BI117 | CAACTGGTGCTGACCCAGCCCCCTTCCGTCTCCGGCGCC |
| 268 | VL nt | CCGGGCCAGCGCGTCACTATCTCCTGTACCGGCAGCTCC |
| | | AGCAACATCGGAGCAGGATACGACGTGCACTGGTACCAA |
| | | CAGCTCCCCGGAACCGCGCCTAAGCTGCTGATCTACGGG |
| | | AACTCTAACCGGCCGTCCGGCGTGCCTGACCGCTTCAGC |
| | | GGATCGAAGTCCGGCACCAGCGCCTCCCTGGCCATCACT |
| | | GGACTGCAGGCCGAGGACGAAGCCGATTACTACTGCCAG |
| | | TCCTACGACTCCTCCCTGTCCGAGGAAGTGTTCGGAGGC |
| | | GGGACGAAGCTCACCGTCCTG |
| SEQ ID NO: | aCSF1R BI123 | TCCCTCGTGCTGACCCAACCTCCTTCAGTCTCCGTGGCC |
| 269 | VL nt | CCCGGCAAGACCGCCCGCATCACCTGTGGCGGTAACAAC |
| | | ATCGGCTCCAAGTCAGTCCACTGGTACCAGCAGAAGCCG |
| | | GGCCAAGCTCCCGTGCTGGTCGTGTACGACGACTCAGAC |
| | | CGCCCCAGCGGTATCCCTGAGAGATTTAGCGGATCCAAC |
| | | TCCGGGAACACCGCTACCCTGACCATCTCAAGGGTGGAG |
| | | GCCGGAGACGAAGCCGACTACTACTGCCAGGTGTGGGAT |
| | | TCCAGCTCCGACCACGTGGTGTTCGGCGGCGGCACTCAG |
| | | CTCACCGTGCTG |

### Antibody Molecules Targeting CCR2

[0372] In some embodiments, provided herein are antibody molecules (e.g., monospecific or multispecific antibody molecules) that bind to CCR2, e.g., human CCR2.

[0373] In some embodiments, the anti-CCR2 antibody molecule comprises one, two, or three heavy chain CDRs (e.g., HCDR1, HCDR2, and/or HCDR3) disclosed in Table 17, e.g., in one row of Table 17, or an amino acid sequence comprising no more than 1, 2, 3, 4, 5, or 6 modifications. In some embodiments, the anti-CCR2 antibody molecule comprises one, two, or three heavy chain CDRs (e.g., HCDR1, HCDR2, and/or HCDR3) from a heavy chain variable region (VH) disclosed in Table 19, e.g., optionally wherein the CDRs are according to the Kabat, Chothia, or IMGT definition. In some embodiments, the anti-CCR2 antibody molecule comprises one, two, three, or four heavy chain framework regions (e.g., heavy chain FR1, FR2, FR3, and/or FR4) disclosed in Table 17, e.g., in one row of Table 17, or an amino acid sequence comprising no more than 1, 2, 3, 4, 5, or 6 modifications. In some embodiments, the anti-CCR2 antibody molecule comprises one, two, three, or four heavy chain framework regions (e.g., heavy chain FR1, FR2, FR3, and/or FR4) from a VH disclosed in Table 19. In some embodiments, the anti-CCR2 antibody molecule comprises a VH disclosed in Table 19, or an amino acid sequence having at least 90, 91, 92, 93, 94, 95, 96, 97, 98, or 99% identity thereto.

[0374] In some embodiments, the anti-CCR2 antibody molecule comprises one, two, or three light chain CDRs (e.g., LCDR1, LCDR2, and/or LCDR3) disclosed in Table 18, e.g., in one row of Table 18, or an amino acid sequence comprising no more than 1, 2, 3, 4, 5, or 6 modifications. In some embodiments, the anti-CCR2 antibody molecule comprises one, two, or three light chain CDRs (e.g., LCDR1, LCDR2, and/or LCDR3) from a light chain variable region (VL) disclosed in Table 20, e.g., optionally wherein the CDRs are according to the Kabat, Chothia, or IMGT definition. In some embodiments, the anti-CCR2 antibody molecule comprises one, two, three, or four light chain framework regions (e.g., light chain FR1, FR2, FR3, and/or FR4) disclosed in Table 18, e.g., in one row of Table 18, or an amino acid sequence comprising no more than 1, 2, 3, 4, 5, or 6 modifications. In some embodiments, the anti-CCR2 antibody molecule comprises one, two, three, or four light chain framework regions (e.g., light chain FR1, FR2, FR3, and/or FR4) from a VL disclosed in Table 20. In some embodiments, the anti-CCR2 antibody molecule comprises a VL disclosed in Table 20, or an amino acid sequence having at least 90, 91, 92, 93, 94, 95, 96, 97, 98, or 99% identity thereto. In some embodiments, the anti-CCR2 antibody molecule does not comprise a VH comprising the amino acid sequence of: EVQLVESGGGLVKPGGSLRLSCAASGFSFNAYAMNWVRQAPGKGLEWVGRIRTKNNN YATYYADSVKDRFTISRDDSKNTLYLQMNSLKTEDTAVYYCTTFYGNGVWGQGTLVT VSS (SEQ ID NO: 480). In some embodiments, the anti-CCR2 antibody molecule does not comprise a VL comprising the amino acid sequence of:

(SEQ ID NO: 481)
DVVMTQSPLSLPVTLGQPASISCKSSQSLLDSDGKTFLNWLLQRPGQSPR
RLIYLVSKLDSGVPDRFSGSGSGTDFTLKISRVEAEDVGVYYCWQGTHFP
YTFGGGTRLEIK.

[0375] In some embodiments, the anti-CCR2 antibody molecule comprises a VH encoded by a nucleotide sequence disclosed in Table 19 (or a nucleotide sequence having at least 80, 85, 90, or 95% identity thereto), and/or a VL encoded by a nucleotide sequence disclosed in Table 20 (or a nucleotide sequence having at least 80, 85, 90, or 95% identity thereto).

TABLE 17
CDRs and framework regions (FR) of exemplary heavy chain
variable regions of anti-CCR2 antibody molecules.

| VH | FR 1 | HCDR 1 | FR 2 | HCDR 2 | FR 3 | HCDR 3 | FR 4 |
|---|---|---|---|---|---|---|---|
| aCCR2 | EVQLVESG | GFSFNA | WVRQAPG | RIRTKNN | RFTISRDDSKS | FYGNGV | WGQGTT |
| Hum1 | GGLVKPGG | YAMN | KGLEWVG | NYATYYA | TLYLQMNSLKT | (SEQ | VTVSS |
| VH | SLRLSCAA | (SEQ | (SEQ | DSVKD | EDTAVYYCTT | ID NO: | (SEQ |
| (SEQ ID | S (SEQ | ID NO: | ID NO: | (SEQ ID | (SEQ ID NO: | 448) | ID NO: |
| NO: 343) | ID NO: | 446) | 450) | NO: 447) | 451) | | 453) |
| | 449) | | | | | | |
| aCCR2 | EVQLVESG | GFSFNA | WVRQAPG | RIRTKNN | RFTISRDDSKS | FYGNGV | WGQGTT |
| Hum2 | GGLVQPGG | YAMN | KGLEWVG | NYATYYA | SLYLQMNSLKT | (SEQ | VTVSS |
| VH | SLRLSCAA | (SEQ | (SEQ | DSVKD | EDTAVYYCAT | ID NO: | (SEQ |
| (SEQ ID | S (SEQ | ID NO: | ID NO: | (SEQ ID | (SEQ ID NO: | 448) | ID NO: |
| NO: 344) | ID NO: | 446) | 450) | NO: 447) | 452) | | 453) |
| | 424) | | | | | | |

TABLE 18
CDRs and framework regions (FR) of exemplary
light chain variable regions of anti-CCR2
antibody molecules.

| VL | FR 1 | LCDR 1 | FR 2 | LCDR 2 | FR 3 | LCDR 3 | FR 4 |
|---|---|---|---|---|---|---|---|
| aCCR2 | DVVMTQPS | KSSQSLL | WLQQRPG | LVSKLD | GVPDRFSGSG | WQGTH | FGGGTK |
| VL | LSLPVTLG | DSDGKTF | QSPRRLI | S (SEQ | SGTDFTLKIS | FPYT | VEIK |
| (SEQ | QPASISC | LN (SEQ | Y (SEQ | ID NO: | RVEAEDVGVY | (SEQ | (SEQ |
| ID NO: | (SEQ ID | ID NO: | ID NO: | 455) | YC (SEQ ID | ID NO: | ID NO: |
| 345) | NO: 457) | 454) | 458) | | NO: 459) | 456) | 460) |

TABLE 19
Amino acid and nucleotide sequences of exemplary heavy chain
variable regions of anti-CCR2 antibody molecules.

| SEQ ID NO | Description | Sequence |
|---|---|---|
| SEQ ID NO: | aCCR2 Hum1 | EVQLVESGGGLVKPGGSLRLSCAASGFSFNAYAMNWVRQAP |
| 343 | VH aa | GKGLEWVGRIRTKNNNYATYYADSVKDRFTISRDDSKSTLY |
| | | LQMNSLKTEDTAVYYCTTFYGNGVWGQGTTVTVSS |
| SEQ ID NO: | aCCR2 Hum2 | EVQLVESGGGLVQPGGSLRLSCAASGFSFNAYAMNWVRQAP |
| 344 | VH aa | GKGLEWVGRIRTKNNNYATYYADSVKDRFTISRDDSKSSLY |
| | | LQMNSLKTEDTAVYYCATFYGNGVWGQGTTVTVSS |
| SEQ ID NO: | aCCR2 Hum1 | GAAGTGCAGCTGGTGGAAAGCGGTGGCGGTCTGGTGCAGCC |
| 270 | VH nt | TGGCGGTTCCCTCCGGCTGTCATGTGCTGCCTCCGGATTCT |
| | | CGTTCAACGCGTATGCCATGAACTGGGTGAGGCAGGCCCCG |
| | | GGAAAGGGACTGGAATGGGTGGGGAGAATCCGGACCAAGAA |
| | | CAATAACTACGCTACTTACTACGCCGACTCCGTCAAGGACC |
| | | GGTTCACAATTTCCCGGGACGACAGCAAGAGCTCACTGTAC |
| | | CTTCAGATGAACAGCCTCAAAACCGAGGACACCGCCGTGTA |
| | | CTACTGTGCCACCTTTTACGGCAACGGTGTGTGGGGACAGG |
| | | GAACAACTGTCACCGTGTCCTCC |
| SEQ ID NO: | aCCR2 Hum2 | GAGGTGCAGCTGGTTGAATCTGGCGGAGGATTGGTTCAGCC |
| 271 | VH nt | TGGCGGCTCTCTGAGACTGTCTTGTGCCGCCTCTGGCTTCT |
| | | CCTTCAACGCCTACGCCATGAACTGGGTCCGACAGGCTCCT |
| | | GGCAAAGGCCTGGAATGGGTCGGAAGAATCCGGACCAAGAA |
| | | CAACAACTACGCCACCTACTACGCCGACTCCGTGAAGGACC |
| | | GGTTCACCATCTCTCGGGACGACTCCAAGTCCAGCCTGTAC |
| | | CTGCAGATGAACTCCCTGAAAACCGAGGACACCGCCGTGTA |
| | | CTACTGCGCCACCTTTTACGGCAATGGCGTGTGGGGCCAGG |
| | | GCACCACAGTTACAGTTTCTTCC |

TABLE 20
Amino acid and nucleotide sequences of exemplary light chain
variable regions of anti-CCR2 antibody molecules.

| SEQ ID NO | Description | Sequence |
|---|---|---|
| SEQ ID NO: | aCCR2 VL aa | DVVMTQSPLSLPVTLGQPASISCKSSQSLLDSDGKTFLNWLQ |
| 345 | | QRPGQSPRRLIYLVSKLDSGVPDRFSGSGSGTDFTLKISRVE |
| | | AEDVGVYYCWQGTHFPYTFGGGTKVEIK |
| SEQ ID NO: | aCCR2 VL nt | GACGTCGTCATGACCCAATCCCCGCTCTCCCTGCCGGTGACT |
| 272 | | CTCGGCCAGCCGGCGTCCATCTCGTGCAAGTCCTCCCAATCC |
| | | CTGCTGGATTCGGATGGGAAGACTTTCCTGAACTGGCTGCAG |
| | | CAACGGCCCGGCCAGTCGCCACGGCGGCTGATCTACCTGGTG |
| | | TCCAAGCTGGATTCAGGTGTGCCTGATAGATTCTCCGGCAGC |
| | | GGATCGGGGACCGACTTCACGCTGAAGATCTCCAGAGTGGAA |
| | | GCAGAGGACGTGGGCGTCTATTACTGTTGGCAGGGGACTCAT |
| | | TTCCCCTATACCTTTGGAGGTGGTACTAAGGTGGAAATTAAG |

### Antibody Molecules Targeting PD-L1

[0376] In some embodiments, provided herein are antibody molecules (e.g., monospecific or multispecific antibody molecules) that bind to PD-L1, e.g., human PD-L1.

[0377] In some embodiments, the anti-PD-L1 antibody molecule comprises one, two, or three heavy chain CDRs (e.g., HCDR1, HCDR2, and/or HCDR3) disclosed in Table 21, e.g., in one row of Table 21, or an amino acid sequence comprising no more than 1, 2, 3, 4, 5, or 6 modifications. In some embodiments, the anti-PD-L1 antibody molecule comprises one, two, or three heavy chain CDRs (e.g., HCDR1, HCDR2, and/or HCDR3) from a heavy chain variable region (VH) disclosed in Table 23, e.g., optionally wherein the CDRs are according to the Kabat, Chothia, or IMGT definition. In some embodiments, the anti-PD-L1 antibody molecule comprises one, two, three, or four heavy chain framework regions (e.g., heavy chain FR1, FR2, FR3, and/or FR4) disclosed in Table 21, e.g., in one row of Table 21, or an amino acid sequence comprising no more than 1, 2, 3, 4, 5, or 6 modifications. In some embodiments, the anti-PD-L1 antibody molecule comprises one, two, three, or four heavy chain framework regions (e.g., heavy chain FR1, FR2, FR3, and/or FR4) from a VH disclosed in Table 23. In some embodiments, the anti-PD-L1 antibody molecule comprises a VH disclosed in Table 23, or an amino acid sequence having at least 90, 91, 92, 93, 94, 95, 96, 97, 98, or 99% identity thereto.

[0378] In some embodiments, the anti-PD-L1 antibody molecule comprises one, two, or three light chain CDRs (e.g., LCDR1, LCDR2, and/or LCDR3) disclosed in Table 22, e.g., in one row of Table 22, or an amino acid sequence comprising no more than 1, 2, 3, 4, 5, or 6 modifications. In some embodiments, the anti-PD-L1 antibody molecule comprises one, two, or three light chain CDRs (e.g., LCDR1, LCDR2, and/or LCDR3) from a light chain variable region (VL) disclosed in Table 24, e.g., optionally wherein the CDRs are according to the Kabat, Chothia, or IMGT definition. In some embodiments, the anti-PD-L1 antibody molecule comprises one, two, three, or four light chain framework regions (e.g., light chain FR1, FR2, FR3, and/or FR4) disclosed in Table 22, e.g., in one row of Table 22, or an amino acid sequence comprising no more than 1, 2, 3, 4, 5, or 6 modifications. In some embodiments, the anti-PD-L1 antibody molecule comprises one, two, three, or four light chain framework regions (e.g., light chain FR1, FR2, FR3, and/or FR4) from a VL disclosed in Table 24. In some embodiments, the anti-PD-L1 antibody molecule comprises a VL disclosed in Table 24, or an amino acid sequence having at least 90, 91, 92, 93, 94, 95, 96, 97, 98, or 99% identity thereto.

[0379] In some embodiments, the anti-PD-L1 antibody molecule comprises a VH encoded by a nucleotide sequence disclosed in Table 23 (or a nucleotide sequence having at least 80, 85, 90, or 95% identity thereto), and/or a VL encoded by a nucleotide sequence disclosed in Table 24 (or a nucleotide sequence having at least 80, 85, 90, or 95% identity thereto).

TABLE 21
CDRs and framework regions (FR) of exemplary heavy chain
variable regions of anti-PD-L1 antibody molecules.

| VH | FR 1 | HCDR 1 | FR 2 | HCDR 2 | FR 3 | HCDR 3 | FR 4 |
|---|---|---|---|---|---|---|---|
| aPDL1 | QVQLVQSG | GGTFSS | WVRQAPG | GIIPIFGT | RVTITADKST | GGYSYG | WGQGTL |
| BH794 | AEVKKPGS | YAIS | QGLEWMG | ANYAQKFQ | STAYMELSSL | SLDY | VTVSS |
| VH | SVKVSCKA | (SEQ | (SEQ | G (SEQ | RSEDTAVYYC | (SEQ | (SEQ |
| (SEQ | S (SEQ | ID NO: | ID NO: | ID NO: | AR (SEQ ID | ID NO: | ID NO: |
| ID NO: | ID NO: | 461) | 465) | 462) | NO: 466) | 463) | 430) |
| 346) | 464) | | | | | | |

TABLE 22
CDRs and framework regions (FR) of exemplary
light chain variable regions of anti-PD-L1
antibody molecules.

| VL | FR 1 | LCDR 1 | FR 2 | LCDR 2 | FR 3 | LCDR 3 | FR 4 |
|---|---|---|---|---|---|---|---|
| aPDL1 | DIQMTQS | RASQSI | WYQQKPG | AASSLQ | GVPSRFSGS | QQSYST | FGQGTK |
| BH794 | PSSLSAS | ISDLN | KAPKLLI | S (SEQ | GSGTDFTLT | PYT | LEIK |
| VL | VGDRVTI | (SEQ | H (SEQ | ID NO: | ISSLQPEDF | (SEQ | (SEQ |
| (SEQ | TC SEQ | ID NO: | ID NO: | 468) | ATYYC | ID NO: | ID NO: |
| ID NO: | ID NO: | 467) | 471) | | (SEQ ID | 469) | 473) |
| 347) | 470 | | | | NO: 472) | | |

TABLE 23
Amino acid and nucleotide sequences of exemplary heavy chain
variable regions of anti-PD-L1 antibody molecules.

| SEQ ID NO | Description | Sequence |
|---|---|---|
| SEQ ID NO: | aPDL1 | QVQLVQSGAEVKKPGSSVKVSCKASGGTFSSYAISWVRQAPGQGLE |
| 346 | BH794 VH | WMGGIIPIFGTANYAQKFQGRVTITADKSTSTAYMELSSLRSEDTA |
| | aa | VYYCARGGYSYGSLDYWGQGTLVTVSS |
| SEQ ID NO: | aPDL1 | CAGGTGCAGCTGGTTCAGTCTGGCGCCGAAGTGAAGAAACCTGGCT |
| 273 | BH794 VH | CCTCCGTGAAGGTGTCCTGCAAGGCTTCTGGCGGCACCTTCTCCTC |
| | nt | TTACGCCATCTCCTGGGTCCGACAGGCTCCTGGACAAGGCTTGGAA |
| | | TGGATGGGCGGCATCATCCCCATCTTCGGCACCGCCAATTACGCCC |
| | | AGAAATTCCAGGGCAGAGTGACCATCACCGCCGACAAGTCTACCTC |
| | | CACCGCCTACATGGAACTGTCCAGCCTGAGATCTGAGGACACCGCC |
| | | GTGTACTACTGTGCCAGAGGCGGCTACTCTTACGGCTCCCTGGATT |
| | | ATTGGGGCCAGGGCACACTGGTCACCGTGTCCTCT |

TABLE 24
Amino acid and nucleotide sequences of exemplary light chain
variable regions of anti-PD-L1 antibody molecules.

| SEQ ID NO | Description | Sequence |
|---|---|---|
| SEQ ID NO: | aPDL1 | DIQMTQSPSSLSASVGDRVTITCRASQSIISDLNWYQQKPGKAPKL |
| 347 | BH794 VL aa | LIHAASSLQSGVPSRFSGSGSGTDFTLTISSLQPEDFATYYCQQSY |
| | | STPYTFGQGTKLEIK |
| SEQ ID NO: | aPDL1 | GACATCCAGATGACCCAGTCTCCATCCTCTCTGTCCGCCTCTGTGG |
| 274 | BH794 VL nt | GCGACAGAGTGACCATCACCTGTCGGGCCTCTCAGTCCATCATCTC |
| | | CGACCTGAACTGGTATCAGCAGAAGCCCGGCAAGGCCCCTAAGCTG |
| | | CTGATCCATGCTGCTTCCAGTCTGCAGTCTGGCGTGCCCTCTAGAT |
| | | TCTCCGGCTCTGGCTCTGGCACCGACTTTACCCTGACAATCTCCAG |
| | | CCTGCAGCCTGAGGACTTCGCCACCTACTACTGCCAGCAGTCCTAC |
| | | AGCACCCCTTACACCTTTGGCCAGGGCACCAAGCTGGAAATCAAG |

### Multispecific Antibody Molecules

[0380] In embodiments, multispecific antibody molecules can comprise more than one antigen-binding site, where different sites are specific for different antigens. In embodiments, multispecific antibody molecules can bind more than one (e.g., two or more) epitopes on the same antigen. In embodiments, multispecific antibody molecules comprise an antigen-binding site specific for a target cell (e.g., cancer cell) and a different antigen-binding site specific for an immune effector cell. In one embodiment, the multispecific antibody molecule is a bispecific antibody molecule. Bispecific antibody molecules can be classified into five different structural groups: (i) bispecific immunoglobulin G (BsIgG); (ii) IgG appended with an additional antigen-binding moiety; (iii) bispecific antibody fragments; (iv) bispecific fusion proteins; and (v) bispecific antibody conjugates.

[0381] BsIgG is a format that is monovalent for each antigen. Exemplary BsIgG formats include but are not limited to crossMab, DAF (two-in-one), DAF (four-in-one), DutaMab, DT-IgG, knobs-in-holes common LC, knobs-in-holes assembly, charge pair, Fab-arm exchange, SEEDbody, triomab, LUZ-Y, Fcab, κλ-body, orthogonal Fab. See Spiess et al. Mol. Immunol. 67(2015):95-106. Exemplary BsIgGs include catumaxomab (Fresenius Biotech, Trion Pharma, Neopharm), which contains an anti-CD3 arm and an anti-EpCAM arm; and ertumaxomab (Neovii Biotech, Fresenius Biotech), which targets CD3 and HER2. In some embodiments, BsIgG comprises heavy chains that are engineered for heterodimerization. For example, heavy chains can be engineered for heterodimerization using a “knobs-into-holes” strategy, a SEED platform, a common heavy chain (e.g., in Kk-bodies), and use of heterodimeric Fc regions. See Spiess et al. Mol. Immunol. 67(2015):95-106. Strategies that have been used to avoid heavy chain pairing of homodimers in BsIgG include knobs-in-holes, duobody, azymetric, charge pair, HA-TF, SEEDbody, and differential protein A affinity. See Id. BsIgG can be produced by separate expression of the component antibodies in different host cells and subsequent purification/assembly into a BsIgG. BsIgG can also be produced by expression of the component antibodies in a single host cell. BsIgG can be purified using affinity chromatography, e.g., using protein A and sequential pH elution.

[0382] IgG appended with an additional antigen-binding moiety is another format of bispecific antibody molecules. For example, monospecific IgG can be engineered to have bispecificity by appending an additional antigen-binding unit onto the monospecific IgG, e.g., at the N- or C-terminus of either the heavy or light chain. Exemplary additional antigen-binding units include single domain antibodies (e.g., variable heavy chain or variable light chain), engineered protein scaffolds, and paired antibody variable regions (e.g., single chain variable fragments or variable fragments). See Id. Examples of appended IgG formats include dual variable domain IgG (DVD-Ig), IgG(H)-scFv, scFv-(H)IgG, IgG(L)-scFv, scFv-(L)IgG, IgG(L,H)-Fv, IgG(H)-V, V(H)-IgG, IgG(L)-V, V(L)-IgG, KIH IgG-scFab, 2scFv-IgG, IgG-2scFv, scFv4-Ig, zybody, and DVI-IgG (four-in-one). See Spiess et al. Mol. Immunol. 67(2015):95-106. An example of an IgG-scFv is MM-141 (Merrimack Pharmaceuticals), which binds IGF-1R and HER3. Examples of DVD-Ig include ABT-981 (AbbVie), which binds IL-1α and IL-1β; and ABT-122 (AbbVie), which binds TNF and IL-17A.

[0383] Bispecific antibody fragments (BsAb) are a format of bispecific antibody molecules that lack some or all of the antibody constant domains. For example, some BsAb lack an Fc region. In embodiments, bispecific antibody fragments include heavy and light chain regions that are connected by a peptide linker that permits efficient expression of the BsAb in a single host cell. Exemplary bispecific antibody fragments include but are not limited to nanobody, nanobody-HAS, BiTE, Diabody, DART, TandAb, scDiabody, scDiabody-CH3, Diabody-CH3, triple body, miniantibody, minibody, TriBi minibody, scFv-CH3 KIH, Fab-scFv, scFv-CH-CL-scFv, F(ab′)2, F(ab′)2-scFv2, scFv-KIH, Fab-scFv-Fc, tetravalent HCAb, scDiabody-Fc, Diabody-Fc, tandem scFv-Fc, and intrabody. See Id For example, the BiTE format comprises tandem scFvs, where the component scFvs bind to CD3 on T cells and a surface antigen on cancer cells

[0384] Bispecific fusion proteins include antibody fragments linked to other proteins, e.g., to add additional specificity and/or functionality. An example of a bispecific fusion protein is an immTAC, which comprises an anti-CD3 scFv linked to an affinity-matured T-cell receptor that recognizes HLA-presented peptides. In embodiments, the dock-and-lock (DNL) method can be used to generate bispecific antibody molecules with higher valency. Also, fusions to albumin binding proteins or human serum albumin can be extend the serum half-life of antibody fragments. See Id

[0385] In embodiments, chemical conjugation, e.g., chemical conjugation of antibodies and/or antibody fragments, can be used to create BsAb molecules. See Id An exemplary bispecific antibody conjugate includes the CovX-body format, in which a low molecular weight drug is conjugated site-specifically to a single reactive lysine in each Fab arm or an antibody or fragment thereof. In embodiments, the conjugation improves the serum half-life of the low molecular weight drug. An exemplary CovX-body is CVX-241 (NCT01004822), which comprises an antibody conjugated to two short peptides inhibiting either VEGF or Ang2. See Id

[0386] The antibody molecules can be produced by recombinant expression, e.g., of at least one or more component, in a host system. Exemplary host systems include eukaryotic cells (e.g., mammalian cells, e.g., CHO cells, or insect cells, e.g., SF9 or S2 cells) and prokaryotic cells (e.g., E. coli). Bispecific antibody molecules can be produced by separate expression of the components in different host cells and subsequent purification/assembly. Alternatively, the antibody molecules can be produced by expression of the components in a single host cell. Purification of bispecific antibody molecules can be performed by various methods such as affinity chromatography, e.g., using protein A and sequential pH elution. In other embodiments, affinity tags can be used for purification, e.g., histidine-containing tag, myc tag, or streptavidin tag.

### Various Embodiments of Multispecific Antibody Molecules

[0387] In one aspect, provided herein is a multispecific antibody molecule comprising an anti-CSF1R binding moiety. In one embodiment, the anti-CSF1R binding moiety comprises an anti-CSF1R antibody molecule disclosed herein, e.g., an anti-CSF1R antibody molecule disclosed in the section with the subtitle “Antibody molecules targeting CSF1R.” In some embodiments, the multispecific antibody molecule further comprises an anti-CCR2 binding moiety (e.g., an anti-CCR2 antibody molecule disclosed herein), an anti-PD-L1 binding moiety (e.g., an anti-PD-L1 antibody molecule disclosed herein), a TGF beta inhibitor, and/or a cytokine molecule (e.g., an IL-2 molecule).

[0388] In one aspect, provided herein is a multispecific antibody molecule comprising an anti-CCR2 binding moiety. In one embodiment, the anti-CCR2 binding moiety comprises an anti-CCR2 antibody molecule disclosed herein, e.g., an anti-CCR2 antibody molecule disclosed in the section with the subtitle “Antibody molecules targeting CCR2.” In some embodiments, the multispecific antibody molecule further comprises an anti-CSF1R binding moiety (e.g., an anti-CSF1R antibody molecule disclosed herein), an anti-PD-L1 binding moiety (e.g., an anti-PD-L1 antibody molecule disclosed herein), a TGF beta inhibitor, and/or a cytokine molecule (e.g., an IL-2 molecule).

[0389] In one aspect, provided herein is a multispecific antibody molecule comprising an anti-PD-L1 binding moiety. In one embodiment, the anti-PD-L1 binding moiety comprises an anti-PD-L1 antibody molecule disclosed herein, e.g., an anti-PD-L1 antibody molecule disclosed in the section with the subtitle “Antibody molecules targeting PD-L1.” In some embodiments, the multispecific antibody molecule further comprises an anti-CSF1R binding moiety (e.g., an anti-CSF1R antibody molecule disclosed herein), an anti-CCR2 binding moiety (e.g., an anti-CCR2 antibody molecule disclosed herein), a TGF beta inhibitor, and/or a cytokine molecule (e.g., an IL-2 molecule).

[0390] In some embodiments, the multispecific antibody molecule comprises an anti-CSF1R binding moiety and an anti-CCR2 binding moiety. In some embodiments, the multispecific antibody molecule comprises an amino acid sequence disclosed in Table 25, or a fragment thereof. In some embodiments, the multispecific antibody molecule is or comprises a multispecific antibody molecule disclosed herein, e.g., BIM0648 or BIM0652 disclosed in Table 34. In some embodiments, the multispecific antibody molecule comprises one or more CDRs, one or more heavy chain variable regions, one or more light chain variable regions, one or more heavy chains, and/or one or more light chains of BIM0648 or BIM0652 disclosed in Table 34. In some embodiments, the multispecific antibody molecule is or comprises a multispecific antibody molecule disclosed herein, e.g., any of molecules 1-86 disclosed herein, e.g., any of molecules 10-86 disclosed in Table 28, e.g., any of molecules BIM0204, BIM0205, BIM0206, BIM0207, BIM0208, BIM0209, BIM0210, BIM0211, BIM0542, BIM0543, BIM0544, BIM0545, BIM0546, BIM0547, BIM0548, BIM0549, BIM0550, BIM0551, BIM0552, BIM0553, BIM0554, BIM0555, BIM0556, BIM0566, and BIM0567 disclosed in Table 28. In some embodiments, the multispecific antibody molecule comprises one or more CDRs, one or more heavy chain variable regions, one or more light chain variable regions, one or more heavy chains, and/or one or more light chains of any of molecules BIM0204, BIM0205, BIM0206, BIM0207, BIM0208, BIM0209, BIM0210, BIM0211, BIM0542, BIM0543, BIM0544, BIM0545, BIM0546, BIM0547, BIM0548, BIM0549, BIM0550, BIM0551, BIM0552, BIM0553, BIM0554, BIM0555, BIM0556, BIM0566, and BIM0567 disclosed in Table 28.

TABLE 25
Amino acid and nucleotide sequences of exemplary
multispecific antibody molecules, e.g., targeting
CSF1R, CCR2, or PD-L1.

| SEQ ID | | |
|---|---|---|
| NO | Description | Sequence |
| SEQ ID | aCSF1R | EVQLVESGGGLVQPGGSLRLSCAASGFTFSNDEMNWIRQAPGKGLEWVSYI |
| NO: | BI117 VH- | SSRSSTIYYADAVKGRFTISRDNARNSLYLQMNSLRAEDTAVYYCARGVDG |
| 351 | hCH1- | DFSFDYWGQGTLVTVSSASTKGPSVFPLAPSSKSTSGGTAALGCLVKDYFP |
| | hFc_Hole | EPVTVSWNSGALTSGVHTFPAVLQSSGLYSLSSVVTVPSSSLGTQTYICNV |
| | | NHKPSNTKVDKRVEPKSCDKTHTCPPCPAPELLGGPSVFLFPPKPKDTLMI |
| | | SRTPEVTCVVVDVSHEDPEVKFNWYVDGVEVHNAKTKPREEQYNSTYRVVS |
| | | VLTVLHQDWLNGKEYKCKVSNKALPAPIEKTISKAKGQPREPQVCTLPPSR |
| | | EEMTKNQVSLSCAVKGFYPSDIAVEWESNGQPENNYKTTPPVLDSDGSFFL |
| | | VSKLTVDKSRWQQGNVFSCSVMHEALHNHYTQKSLSLSPGX, wherein |
| | | X is K or absent |
| SEQ ID | aCSF1R | EVQLVESGGGLVQPGGSLRLSCAASGFTFSNDEMNWIRQAPGKGLEWVSYI |
| NO: | BI117 C5- | SSGSSTIYYADAVKGRFTISRDNARNSLYLQMNSLRAEDTAVYYCARGVDG |
| 352 | R2A VH- | DFSFDYWGQGTLVTVSSASTKGPSVFPLAPSSKSTSGGTAALGCLVKDYFP |
| | hCH1- | EPVTVSWNSGALTSGVHTFPAVLQSSGLYSLSSVVTVPSSSLGTQTYICNV |
| | hFc_Hole | NHKPSNTKVDKRVEPKSCDKTHTCPPCPAPELLGGPSVFLFPPKPKDTLMI |
| | | SRTPEVTCVVVDVSHEDPEVKFNWYVDGVEVHNAKTKPREEQYNSTYRVVS |
| | | VLTVLHQDWLNGKEYKCKVSNKALPAPIEKTISKAKGQPREPQVCTLPPSR |
| | | EEMTKNQVSLSCAVKGFYPSDIAVEWESNGQPENNYKTTPPVLDSDGSFFL |
| | | VSKLTVDKSRWQQGNVFSCSVMHEALHNHYTQKSLSLSPGX, wherein |
| | | X is K or absent |
| SEQ ID | aCSF1R | EVQLVESGGGLVQPGGSLRLSCAASGFTFSNDEMNWIRQAPGKGLEWVSFI |
| NO: | BI117 C9- | SGGSSTIYYADAVKGRFTISRDNARNSLYLQMNSLRAEDTAVYYCARGVDG |
| 353 | R2A VH- | DFSFDYWGQGTLVTVSSASTKGPSVFPLAPSSKSTSGGTAALGCLVKDYFP |
| | hCH1- | EPVTVSWNSGALTSGVHTFPAVLQSSGLYSLSSVVTVPSSSLGTQTYICNV |
| | hFc_Hole | NHKPSNTKVDKRVEPKSCDKTHTCPPCPAPELLGGPSVFLFPPKPKDTLMI |
| | | SRTPEVTCVVVDVSHEDPEVKFNWYVDGVEVHNAKTKPREEQYNSTYRVVS |
| | | VLTVLHQDWLNGKEYKCKVSNKALPAPIEKTISKAKGQPREPQVCTLPPSR |
| | | EEMTKNQVSLSCAVKGFYPSDIAVEWESNGQPENNYKTTPPVLDSDGSFFL |
| | | VSKLTVDKSRWQQGNVFSCSVMHEALHNHYTQKSLSLSPGX, wherein |
| | | X is K or absent |
| SEQ ID | aCSF1R | EVQLVESGGGLVQPGGSLRLSCAASGFTFSNDEMNWIRQAPGKGLEWVSYI |
| NO: | BI117 D1- | SSRSSTIYYADAVKGRFTISRDNARNSLYLQMNSLRAEDTAVYYCARNSDE |
| 354 | R2A VH- | DGSFDYWGQGTLVTVSSASTKGPSVFPLAPSSKSTSGGTAALGCLVKDYFP |
| | hCH1- | EPVTVSWNSGALTSGVHTFPAVLQSSGLYSLSSVVTVPSSSLGTQTYICNV |
| | hFc_Hole | NHKPSNTKVDKRVEPKSCDKTHTCPPCPAPELLGGPSVFLFPPKPKDTLMI |
| | | SRTPEVTCVVVDVSHEDPEVKFNWYVDGVEVHNAKTKPREEQYNSTYRVVS |
| | | VLTVLHQDWLNGKEYKCKVSNKALPAPIEKTISKAKGQPREPQVCTLPPSR |
| | | EEMTKNQVSLSCAVKGFYPSDIAVEWESNGQPENNYKTTPPVLDSDGSFFL |
| | | VSKLTVDKSRWQQGNVFSCSVMHEALHNHYTQKSLSLSPGX, wherein |
| | | X is K or absent |
| SEQ ID | aCSF1R | EVQLVESGGGLVQPGGSLRLSCAASGFTFSNDEMNWIRQAPGKGLEWVSYI |
| NO: | BI117 E2- | TSKSSTIYYADSVKGRFTISRDNARNSLYLQMNSLRAEDTAVYYCARGVDG |
| 355 | R2B VH- | DFSFDYWGQGTLVTVSSASTKGPSVFPLAPSSKSTSGGTAALGCLVKDYFP |
| | hCH1- | EPVTVSWNSGALTSGVHTFPAVLQSSGLYSLSSVVTVPSSSLGTQTYICNV |
| | hFc_Hole | NHKPSNTKVDKRVEPKSCDKTHTCPPCPAPELLGGPSVFLFPPKPKDTLMI |
| | | SRTPEVTCVVVDVSHEDPEVKFNWYVDGVEVHNAKTKPREEQYNSTYRVVS |
| | | VLTVLHQDWLNGKEYKCKVSNKALPAPIEKTISKAKGQPREPQVCTLPPSR |
| | | EEMTKNQVSLSCAVKGFYPSDIAVEWESNGQPENNYKTTPPVLDSDGSFFL |
| | | VSKLTVDKSRWQQGNVFSCSVMHEALHNHYTQKSLSLSPGX, wherein |
| | | X is K or absent |
| SEQ ID | aCSF1R | EVQLVESGGGLVQPGGSLRLSCAASGFTFSNDEMNWIRQAPGKGLEWVSYI |
| NO: | BI117 G1- | SSRSSTIYYADAVKGRFTISRDNARNSLYLQMNSLRAEDTAVYYCARGVDG |
| 356 | R2B VH- | DFSFDVWGQGTLVTVSSASTKGPSVFPLAPSSKSTSGGTAALGCLVKDYFP |
| | hCH1- | EPVTVSWNSGALTSGVHTFPAVLQSSGLYSLSSVVTVPSSSLGTQTYICNV |
| | hFc_Hole | NHKPSNTKVDKRVEPKSCDKTHTCPPCPAPELLGGPSVFLFPPKPKDTLMI |
| | | SRTPEVTCVVVDVSHEDPEVKFNWYVDGVEVHNAKTKPREEQYNSTYRVVS |
| | | VLTVLHQDWLNGKEYKCKVSNKALPAPIEKTISKAKGQPREPQVCTLPPSR |
| | | EEMTKNQVSLSCAVKGFYPSDIAVEWESNGQPENNYKTTPPVLDSDGSFFL |
| | | VSKLTVDKSRWQQGNVFSCSVMHEALHNHYTQKSLSLSPGX, wherein |
| | | X is K or absent |
| SEQ ID | aCSF1R | EVQLVESGGGLVQPGGSLRLSCAASGFTFSNDEMNWIRQAPGKGLEWVSYI |
| NO: | BI117 | TSKSSTIYYADAVKGRFTISRDNARNSLYLQMNSLRAEDTAVYYCARGVDG |
| 357 | G12-R2B | DFSFDYWGQGTLVTVSSASTKGPSVFPLAPSSKSTSGGTAALGCLVKDYFP |
| | VH-hCH1- | EPVTVSWNSGALTSGVHTFPAVLQSSGLYSLSSVVTVPSSSLGTQTYICNV |
| | hFc_Hole | NHKPSNTKVDKRVEPKSCDKTHTCPPCPAPELLGGPSVFLFPPKPKDTLMI |
| | | SRTPEVTCVVVDVSHEDPEVKFNWYVDGVEVHNAKTKPREEQYNSTYRVVS |
| | | VLTVLHQDWLNGKEYKCKVSNKALPAPIEKTISKAKGQPREPQVCTLPPSR |
| | | EEMTKNQVSLSCAVKGFYPSDIAVEWESNGQPENNYKTTPPVLDSDGSFFL |
| | | VSKLTVDKSRWQQGNVFSCSVMHEALHNHYTQKSLSLSPGX, wherein |
| | | X is K or absent |
| SEQ ID | aCSF1R | EVQLVESGGGLVQPGGSLRLSCAASGFTFSNDEMNWIRQAPGKGLEWVSYI |
| NO: | BI117 D6- | SSRSSTIYYADAVKGRFTISRDNARNSLYLQMNSLRAEDTAVYYCARSVDG |
| 358 | R3B VH- | DGSFDYWGQGTLVTVSSASTKGPSVFPLAPSSKSTSGGTAALGCLVKDYFP |
| | hCH1- | EPVTVSWNSGALTSGVHTFPAVLQSSGLYSLSSVVTVPSSSLGTQTYICNV |
| | hFc_Hole | NHKPSNTKVDKRVEPKSCDKTHTCPPCPAPELLGGPSVFLFPPKPKDTLMI |
| | | SRTPEVTCVVVDVSHEDPEVKFNWYVDGVEVHNAKTKPREEQYNSTYRVVS |
| | | VLTVLHQDWLNGKEYKCKVSNKALPAPIEKTISKAKGQPREPQVCTLPPSR |
| | | EEMTKNQVSLSCAVKGFYPSDIAVEWESNGQPENNYKTTPPVLDSDGSFFL |
| | | VSKLTVDKSRWQQGNVFSCSVMHEALHNHYTQKSLSLSPGX, wherein |
| | | X is K or absent |
| SEQ ID | aCSF1R | EVQLVESGGGLVQPGGSLRLSCAASGFTFSNDEMNWIRQAPGKGLEWVSYI |
| NO: | BI117 A6- | SSRSSTIYYADAVKGRFTISRDNARNSLYLQMNSLRAEDTAVYYCARSSDG |
| 359 | R3B VH- | STSFDYWGQGTLVTVSSASTKGPSVFPLAPSSKSTSGGTAALGCLVKDYFP |
| | hCH1- | EPVTVSWNSGALTSGVHTFPAVLQSSGLYSLSSVVTVPSSSLGTQTYICNV |
| | hFc_Hole | NHKPSNTKVDKRVEPKSCDKTHTCPPCPAPELLGGPSVFLFPPKPKDTLMI |
| | | SRTPEVTCVVVDVSHEDPEVKFNWYVDGVEVHNAKTKPREEQYNSTYRVVS |
| | | VLTVLHQDWLNGKEYKCKVSNKALPAPIEKTISKAKGQPREPQVCTLPPSR |
| | | EEMTKNQVSLSCAVKGFYPSDIAVEWESNGQPENNYKTTPPVLDSDGSFFL |
| | | VSKLTVDKSRWQQGNVFSCSVMHEALHNHYTQKSLSLSPGX, wherein |
| | | X is K or absent |
| SEQ ID | aCSF1R | EVQLVESGGGLVQPGGSLRLSCAASGFTFSNDEMNWIRQAPGKGLEWVSYI |
| NO: | BI117 | SSSSSTIYYADAVTGRFTISRDNARNSLYLQMNSLRAEDTAVYYCARGVDG |
| 360 | A11-R3B | DFSFDYWGQGTLVTVSSASTKGPSVFPLAPSSKSTSGGTAALGCLVKDYFP |
| | VH-hCH1- | EPVTVSWNSGALTSGVHTFPAVLQSSGLYSLSSVVTVPSSSLGTQTYICNV |
| | hFc_Hole | NHKPSNTKVDKRVEPKSCDKTHTCPPCPAPELLGGPSVFLFPPKPKDTLMI |
| | | SRTPEVTCVVVDVSHEDPEVKFNWYVDGVEVHNAKTKPREEQYNSTYRVVS |
| | | VLTVLHQDWLNGKEYKCKVSNKALPAPIEKTISKAKGQPREPQVCTLPPSR |
| | | EEMTKNQVSLSCAVKGFYPSDIAVEWESNGQPENNYKTTPPVLDSDGSFFL |
| | | VSKLTVDKSRWQQGNVFSCSVMHEALHNHYTQKSLSLSPGX, wherein |
| | | X is K or absent |
| SEQ ID | aCSF1R | EVQLVESGGGLVQPGGSLRLSCAASGFTFSNDEMNWIRQAPGKGLEWVSYI |
| NO: | BI117 B2- | SSRSSTIYYADAVKGRFTISRDNARNSLYLQMNSLRAEDTAVYYCARNSDS |
| 361 | R3B VH- | DGSFDIWGQGTLVTVSSASTKGPSVFPLAPSSKSTSGGTAALGCLVKDYFP |
| | hCH1- | EPVTVSWNSGALTSGVHTFPAVLQSSGLYSLSSVVTVPSSSLGTQTYICNV |
| | hFc_Hole | NHKPSNTKVDKRVEPKSCDKTHTCPPCPAPELLGGPSVFLFPPKPKDTLMI |
| | | SRTPEVTCVVVDVSHEDPEVKFNWYVDGVEVHNAKTKPREEQYNSTYRVVS |
| | | VLTVLHQDWLNGKEYKCKVSNKALPAPIEKTISKAKGQPREPQVCTLPPSR |
| | | EEMTKNQVSLSCAVKGFYPSDIAVEWESNGQPENNYKTTPPVLDSDGSFFL |
| | | VSKLTVDKSRWQQGNVFSCSVMHEALHNHYTQKSLSLSPGX, wherein |
| | | X is K or absent |
| SEQ ID | aCSF1R | EVQLVESGGGLVQPGGSLRLSCAASGFTFSNDEMNWIRQAPGKGLEWVSYI |
| NO: | BI117 C5- | SSRSSTIYYADAVKGRFTISRDNARNSLYLQMNSLRAEDTAVYYCARGVDG |
| 362 | R3B VH- | DFSFDFWGQGTLVTVSSASTKGPSVFPLAPSSKSTSGGTAALGCLVKDYFP |
| | hCH1- | EPVTVSWNSGALTSGVHTFPAVLQSSGLYSLSSVVTVPSSSLGTQTYICNV |
| | hFc_Hole | NHKPSNTKVDKRVEPKSCDKTHTCPPCPAPELLGGPSVFLFPPKPKDTLMI |
| | | SRTPEVTCVVVDVSHEDPEVKFNWYVDGVEVHNAKTKPREEQYNSTYRVVS |
| | | VLTVLHQDWLNGKEYKCKVSNKALPAPIEKTISKAKGQPREPQVCTLPPSR |
| | | EEMTKNQVSLSCAVKGFYPSDIAVEWESNGQPENNYKTTPPVLDSDGSFFL |
| | | VSKLTVDKSRWQQGNVFSCSVMHEALHNHYTQKSLSLSPGX, wherein |
| | | X is K or absent |
| SEQ ID | aCSF1R | EVQLVESGGGLVQPGGSLRLSCAASGFTFSNDEMNWIRQAPGKGLEWVSYI |
| NO: | BI117 C6- | SSRSSTIYYADAVKGRFTISRDNARNSLYLQMNSLRAEDTAVYYCARSGRL |
| 363 | R3B VH- | DGSFDYWGQGTLVTVSSASTKGPSVFPLAPSSKSTSGGTAALGCLVKDYFP |
| | hCH1- | EPVTVSWNSGALTSGVHTFPAVLQSSGLYSLSSVVTVPSSSLGTQTYICNV |
| | hFc_Hole | NHKPSNTKVDKRVEPKSCDKTHTCPPCPAPELLGGPSVFLFPPKPKDTLMI |
| | | SRTPEVTCVVVDVSHEDPEVKFNWYVDGVEVHNAKTKPREEQYNSTYRVVS |
| | | VLTVLHQDWLNGKEYKCKVSNKALPAPIEKTISKAKGQPREPQVCTLPPSR |
| | | EEMTKNQVSLSCAVKGFYPSDIAVEWESNGQPENNYKTTPPVLDSDGSFFL |
| | | VSKLTVDKSRWQQGNVFSCSVMHEALHNHYTQKSLSLSPGX, wherein |
| | | X is K or absent |
| SEQ ID | aCSF1R | EVQLVESGGGLVQPGGSLRLSCAASGFTFSNDEMNWIRQAPGKGLEWVSYI |
| NO: | BI117 | SSRSSTIYYADAVKGRFTISRDNARNSLYLQMNSLRAEDTAVYYCARGVES |
| 364 | D11-R3B | DFSFDYWGQGTLVTVSSASTKGPSVFPLAPSSKSTSGGTAALGCLVKDYFP |
| | VH-hCH1- | EPVTVSWNSGALTSGVHTFPAVLQSSGLYSLSSVVTVPSSSLGTQTYICNV |
| | hFc_Hole | NHKPSNTKVDKRVEPKSCDKTHTCPPCPAPELLGGPSVFLFPPKPKDTLMI |
| | | SRTPEVTCVVVDVSHEDPEVKFNWYVDGVEVHNAKTKPREEQYNSTYRVVS |
| | | VLTVLHQDWLNGKEYKCKVSNKALPAPIEKTISKAKGQPREPQVCTLPPSR |
| | | EEMTKNQVSLSCAVKGFYPSDIAVEWESNGQPENNYKTTPPVLDSDGSFFL |
| | | VSKLTVDKSRWQQGNVFSCSVMHEALHNHYTQKSLSLSPGX, wherein |
| | | X is K or absent |
| SEQ ID | aCSF1R | QVQLVQSGGGVVQPGRSLRLSCAASGFTFSSYAMHWVRQAPGKGLEWVAVI |
| NO: | BI123 VH- | SYDGSNKYYADSVKGRFTISRDNSKNTLYLQMNSLRAEDTAVYYCARELDY |
| 365 | hCH1- | GDYGLDVWGKGTTVTVSSASTKGPSVFPLAPSSKSTSGGTAALGCLVKDYF |
| | hFc_Hole | PEPVTVSWNSGALTSGVHTFPAVLQSSGLYSLSSVVTVPSSSLGTQTYICN |
| | | VNHKPSNTKVDKRVEPKSCDKTHTCPPCPAPELLGGPSVFLFPPKPKDTLM |
| | | ISRTPEVTCVVVDVSHEDPEVKFNWYVDGVEVHNAKTKPREEQYNSTYRVV |
| | | SVLTVLHQDWLNGKEYKCKVSNKALPAPIEKTISKAKGQPREPQVCTLPPS |
| | | REEMTKNQVSLSCAVKGFYPSDIAVEWESNGQPENNYKTTPPVLDSDGSFF |
| | | LVSKLTVDKSRWQQGNVFSCSVMHEALHNHYTQKSLSLSPGX, wherein |
| | | X is K or absent |
| SEQ ID | aCSF1R | QVQLVQSGGGVVQPGRSLRLSCAASGFTFSSYAMHWVRQAPGKGLEWVAVI |
| NO: | BI123 A5- | SYDGSNKYYADSVKGRFTISRDNSKNTLYLQMNSLRAEDTAVYYCARELDY |
| 366 | R3B VH- | GDWGLDVWGKGTTVTVSSASTKGPSVFPLAPSSKSTSGGTAALGCLVKDYF |
| | hCH1- | PEPVTVSWNSGALTSGVHTFPAVLQSSGLYSLSSVVTVPSSSLGTQTYICN |
| | hFc_Hole | VNHKPSNTKVDKRVEPKSCDKTHTCPPCPAPELLGGPSVFLFPPKPKDTLM |
| | | ISRTPEVTCVVVDVSHEDPEVKFNWYVDGVEVHNAKTKPREEQYNSTYRVV |
| | | SVLTVLHQDWLNGKEYKCKVSNKALPAPIEKTISKAKGQPREPQVCTLPPS |
| | | REEMTKNQVSLSCAVKGFYPSDIAVEWESNGQPENNYKTTPPVLDSDGSFF |
| | | LVSKLTVDKSRWQQGNVFSCSVMHEALHNHYTQKSLSLSPGX, wherein |
| | | X is K or absent |
| SEQ ID | aCSF1R | QVQLVQSGGGVVQPGRSLRLSCAASGFTFSSYAMHWVRQAPGKGLEWVAVI |
| NO: | BI123 B6- | PYYGSNKYYADSVKGRFTISRDNSKNTLYLQMNSLRAEDTAVYYCARELDY |
| 367 | R3B VH- | GDYGLDVWGKGTTVTVSSASTKGPSVFPLAPSSKSTSGGTAALGCLVKDYF |
| | hCH1- | PEPVTVSWNSGALTSGVHTFPAVLQSSGLYSLSSVVTVPSSSLGTQTYICN |
| | hFc_Hole | VNHKPSNTKVDKRVEPKSCDKTHTCPPCPAPELLGGPSVFLFPPKPKDTLM |
| | | ISRTPEVTCVVVDVSHEDPEVKFNWYVDGVEVHNAKTKPREEQYNSTYRVV |
| | | SVLTVLHQDWLNGKEYKCKVSNKALPAPIEKTISKAKGQPREPQVCTLPPS |
| | | REEMTKNQVSLSCAVKGFYPSDIAVEWESNGQPENNYKTTPPVLDSDGSFF |
| | | LVSKLTVDKSRWQQGNVFSCSVMHEALHNHYTQKSLSLSPGX, wherein |
| | | X is K or absent |
| SEQ ID | aCSF1R | QVQLVQSGGGVVQPGRSLRLSCAASGFTFSSYAMHWVRQAPGKGLEWVAVI |
| NO: | BI123 C1- | SYDGSDKYYADSVKGRFTISRDNSKNTLYLQMNSLRAEDTAVYYCARELDY |
| 368 | R3B VH- | GDYGLDVWGKGTTVTVSSASTKGPSVFPLAPSSKSTSGGTAALGCLVKDYF |
| | hCH1- | PEPVTVSWNSGALTSGVHTFPAVLQSSGLYSLSSVVTVPSSSLGTQTYICN |
| | hFc_Hole | VNHKPSNTKVDKRVEPKSCDKTHTCPPCPAPELLGGPSVFLFPPKPKDTLM |
| | | ISRTPEVTCVVVDVSHEDPEVKFNWYVDGVEVHNAKTKPREEQYNSTYRVV |
| | | SVLTVLHQDWLNGKEYKCKVSNKALPAPIEKTISKAKGQPREPQVCTLPPS |
| | | REEMTKNQVSLSCAVKGFYPSDIAVEWESNGQPENNYKTTPPVLDSDGSFF |
| | | LVSKLTVDKSRWQQGNVFSCSVMHEALHNHYTQKSLSLSPGX, wherein |
| | | X is K or absent |
| SEQ ID | aCSF1R | QLVLTQPPSVSGAPGQRVTISCTGSSSNIGAGYDVHWYQQLPGTAPKLLIY |
| NO: | BI117 VL- | GNSNRPSGVPDRFSGSKSGTSASLAITGLQAEDEADYYCQSYDSSLSEEVF |
| 369 | hCLIg_v1 | GGGTKLTVLGQPKANPTVTLFPPSSEELQANKATLVCLISDFYPGAVTVAW |
| | | KADGSPVKAGVETTKPSKQSNNKYAASSYLSLTPEQWKSHRSYSCQVTHEG |
| | | STVEKTVAPTECS |
| SEQ ID | aCSF1R | SLVLTQPPSVSVAPGKTARITCGGNNIGSKSVHWYQQKPGQAPVLVVYDDS |
| NO: | BI123 VL- | DRPSGIPERFSGSNSGNTATLTISRVEAGDEADYYCQVWDSSSDHVVFGGG |
| 370 | hCLIg_v1 | TQLTVLGQPKANPTVTLFPPSSEELQANKATLVCLISDFYPGAVTVAWKAD |
| | | GSPVKAGVETTKPSKQSNNKYAASSYLSLTPEQWKSHRSYSCQVTHEGSTV |
| | | EKTVAPTECS |
| SEQ ID | aCCR2 | EVQLVESGGGLVKPGGSLRLSCAASGFSFNAYAMNWVRQAPGKGLEWVGRI |
| NO: | Hum1 VH- | RTKNNNYATYYADSVKDRFTISRDDSKSTLYLQMNSLKTEDTAVYYCTTFY |
| 371 | hCH1- | GNGVWGQGTTVTVSSASTKGPSVFPLAPSSKSTSGGTAALGCLVKDYFPEP |
| | hFc_Knob | VTVSWNSGALTSGVHTFPAVLQSSGLYSLSSVVTVPSSSLGTQTYICNVNH |
| | | KPSNTKVDKRVEPKSCDKTHTCPPCPAPELLGGPSVFLFPPKPKDTLMISR |
| | | TPEVTCVVVDVSHEDPEVKFNWYVDGVEVHNAKTKPREEQYNSTYRVVSVL |
| | | TVLHQDWLNGKEYKCKVSNKALPAPIEKTISKAKGQPREPQVYTLPPCREE |
| | | MTKNQVSLWCLVKGFYPSDIAVEWESNGQPENNYKTTPPVLDSDGSFFLYS |
| | | KLTVDKSRWQQGNVFSCSVMHEALHNHYTQKSLSLSPGX, wherein X |
| | | is K or absent |
| SEQ ID | aCCR2 | EVQLVESGGGLVQPGGSLRLSCAASGFSFNAYAMNWVRQAPGKGLEWVGRI |
| NO: | Hum2 VH- | RTKNNNYATYYADSVKDRFTISRDDSKSSLYLQMNSLK1EDTAVYYCATFY |
| 372 | hCH1- | GNGVWGQGTTVTVSSASTKGPSVFPLAPSSKSTSGGTAALGCLVKDYFPEP |
| | hFc_Knob | VTVSWNSGALTSGVHTFPAVLQSSGLYSLSSVVTVPSSSLGTQTYICNVNH |
| | | KPSNTKVDKRVEPKSCDKTHTCPPCPAPELLGGPSVFLFPPKPKDTLMISR |
| | | TPEVTCVVVDVSHEDPEVKFNWYVDGVEVHNAKTKPREEQYNSTYRVVSVL |
| | | TVLHQDWLNGKEYKCKVSNKALPAPIEKTISKAKGQPREPQVYTLPPCREE |
| | | MTKNQVSLWCLVKGFYPSDIAVEWESNGQPENNYKTTPPVLDSDGSFFLYS |
| | | KLTVDKSRWQQGNVFSCSVMHEALHNHYTQKSLSLSPGX, wherein X |
| | | is K or absent |
| SEQ ID | aCCR2 | DVVMTQSPLSLPVTLGQPASISCKSSQSLLDSDGKTFLNWLQQRPGQSPRR |
| NO: | VL- | LIYLVSKLDSGVPDRFSGSGSGTDFTLKISRVEAEDVGVYYCWQGTHFPYT |
| 373 | hCLIg_vk | FGGGTKVEIKRTVAAPSVFIFPPSDEQLKSGTASVVCLLNNFYPREAKVQW |
| | | KVDNALQSGNSQESVIEQDSKDSTYSLSSTLTLSKADYEKHKVYACEVTHQ |
| | | GLSSPVTKSFNRGEC |
| SEQ ID | aCSF1R | EVQLVESGGGLVQPGGSLRLSCAASGFTFSNDEMNWIRQAPGKGLEWVSYI |
| NO: | BI117 VH- | SSRSSTIYYADAVKGRFTISRDNARNSLYLQMNSLRAEDTAVYYCARGVDG |
| 374 | hCH1- | DFSFDYWGQGTLVTVSSASTKGPSVFPLAPSSKSTSGGTAALGCLVKDYFP |
| | hFc_Hole- | EPVTVSWNSGALTSGVHTFPAVLQSSGLYSLSSVVTVPSSSLGTQTYICNV |
| | 3 x 4GS- | NHKPSNTKVDKRVEPKSCDKTHTCPPCPAPELLGGPSVFLFPPKPKDTLMI |
| | BH794_VH- | SRTPEVTCVVVDVSHEDPEVKFNWYVDGVEVHNAKTKPREEQYNSTYRVVS |
| | 3 x 4GS- | VLTVLHQDWLNGKEYKCKVSNKALPAPIEKTISKAKGQPREPQVCTLPPSR |
| | BH794_VL | EEMTKNQVSLSCAVKGFYPSDIAVEWESNGQPENNYKTTPPVLDSDGSFFL |
| | | VSKLTVDKSRWQQGNVFSCSVMHEALHNHYTQKSLSLSPGXGGGGSGGGGS |
| | | GGGGSQVQLVQSGAEVKKPGSSVKVSCKASGGTFSSYAISWVRQAPGQGLE |
| | | WMGGIIPIFGTANYAQKFQGRVTITADKSTSTAYMELSSLRSEDTAVYYCA |
| | | RGGYSYGSLDYWGQGTLVTVSSGGGGSGGGGSGGGGSDIQMTQSPSSLSAS |
| | | VGDRVTITCRASQSIISDLNWYQQKPGKAPKLLIHAASSLQSGVPSRFSGS |
| | | GSGTDFTLTISSLQPEDFATYYCQQSYSTPYTFGQGTKLEIK, wherein |
| | | X is K or absent |
| SEQ ID | aCSF1R | QVQLVQSGGGVVQPGRSLRLSCAASGFTFSSYAMHWVRQAPGKGLEWVAVI |
| NO: | BI123 VH- | SYDGSNKYYADSVKGRFTISRDNSKNTLYLQMNSLRAEDTAVYYCARELDY |
| 375 | hCH1- | GDYGLDVWGKGTTVTVSSASTKGPSVFPLAPSSKSTSGGTAALGCLVKDYF |
| | hFc_Hole- | PEPVTVSWNSGALTSGVHTFPAVLQSSGLYSLSSVVTVPSSSLGTQTYICN |
| | 3 x 4GS- | VNHKPSNTKVDKRVEPKSCDKTHTCPPCPAPELLGGPSVFLFPPKPKDTLM |
| | BH794_VH- | ISRTPEVTCVVVDVSHEDPEVKFNWYVDGVEVHNAKTKPREEQYNSTYRVV |
| | 3 x 4GS- | SVLTVLHQDWLNGKEYKCKVSNKALPAPIEKTISKAKGQPREPQVCTLPPS |
| | BH794_VL | REEMTKNQVSLSCAVKGFYPSDIAVEWESNGQPENNYKTTPPVLDSDGSFF |
| | | LVSKLTVDKSRWQQGNVFSCSVMHEALHNHYTQKSLSLSPGXGGGGSGGGG |
| | | SGGGGSQVQLVQSGAEVKKPGSSVKVSCKASGGTFSSYAISWVRQAPGQGL |
| | | EWMGGIIPIFGTANYAQKFQGRVTITADKSTSTAYMELSSLRSEDTAVYYC |
| | | ARGGYSYGSLDYWGQGTLVTVSSGGGGSGGGGSGGGGSDIQMTQSPSSLSA |
| | | SVGDRVTITCRASQSIISDLNWYQQKPGKAPKLLIHAASSLQSGVPSRFSG |
| | | SGSGTDFTLTISSLQPEDFATYYCQQSYSTPYTFGQGTKLEIK, |
| | | wherein X is K or absent |
| SEQ ID | aCCR2 | EVQLVESGGGLVKPGGSLRLSCAASGFSFNAYAMNWVRQAPGKGLEWVGRI |
| NO: | Hum1 VH- | RTKNNNYATYYADSVKDRFTISRDDSKSTLYLQMNSLKTEDTAVYYCTTFY |
| 376 | hCH1- | GNGVWGQGTTVTVSSASTKGPSVFPLAPSSKSTSGGTAALGCLVKDYFPEP |
| | hFc_Knob- | VTVSWNSGALTSGVHTFPAVLQSSGLYSLSSVVTVPSSSLGTQTYICNVNH |
| | 3 x 4GS- | KPSNTKVDKRVEPKSCDKTHTCPPCPAPELLGGPSVFLFPPKPKDTLMISR |
| | BH794_VH- | TPEVTCVVVDVSHEDPEVKFNWYVDGVEVHNAKTKPREEQYNSTYRVVSVL |
| | 3 x 4GS- | TVLHQDWLNGKEYKCKVSNKALPAPIEKTISKAKGQPREPQVYTLPPCREE |
| | BH794_VL | MTKNQVSLWCLVKGFYPSDIAVEWESNGQPENNYKTTPPVLDSDGSFFLYS |
| | | KLTVDKSRWQQGNVFSCSVMHEALHNHYTQKSLSLSPGXGGGGSGGGGSGG |
| | | GGSQVQLVQSGAEVKKPGSSVKVSCKASGGTFSSYAISWVRQAPGQGLEWM |
| | | GGIIPIFGTANYAQKFQGRVTITADKSTSTAYMELSSLRSEDTAVYYCARG |
| | | GYSYGSLDYWGQGTLVTVSSGGGGSGGGGSGGGGSDIQMTQSPSSLSASVG |
| | | DRVTITCRASQSIISDLNWYQQKPGKAPKLLIHAASSLQSGVPSRFSGSGS |
| | | GTDFTLTISSLQPEDFATYYCQQSYSTPYTFGQGTKLEIK, wherein X |
| | | is K or absent |
| SEQ ID | aCSF1R | QLVLTQPPSVSGAPGQRVTISCTGSSSNIGAGYDVHWYQQLPGTAPKLLIY |
| NO: | BI117 VL- | GNSNRPSGVPDRFSGSKSGTSASLAITGLQAEDEADYYCQSYDSSLSEEVF |
| 377 | hCLIg_v1- | GGGTKLTVLGQPKANPTVTLFPPSSEELQANKATLVCLISDFYPGAVTVAW |
| | 3 x 4GS-IL2 | KADGSPVKAGVETTKPSKQSNNKYAASSYLSLTPEQWKSHRSYSCQVTHEG |
| | | STVEKTVAPTECSGGGGSGGGGSGGGGSAPTSSSTKKTQLQLEHLLLDLQM |
| | | ILNGINNYKNPKLTRMLTFKFYMPKKATELKHLQCLEEELKPLEEVLNLAQ |
| | | SKNFHLRPRDLISNINVIVLELKGSETTFMCEYADETATIVEFLNRWITFC |
| | | QSIISTLT |
| SEQ ID | aCSF1R | QLVLTQPPSVSGAPGQRVTISCTGSSSNIGAGYDVHWYQQLPGTAPKLLIY |
| NO: | BI117 VL- | GNSNRPSGVPDRFSGSKSGTSASLAITGLQAEDEADYYCQSYDSSLSEEVF |
| 378 | hCLIg_v1- | GGGTKLTVLGQPKANPTVTLFPPSSEELQANKATLVCLISDFYPGAVTVAW |
| | IL2 | KADGSPVKAGVETTKPSKQSNNKYAASSYLSLTPEQWKSHRSYSCQVTHEG |
| | | STVEKTVAPTECSAPTSSSTKKTQLQLEHLLLDLQMILNGINNYKNPKLTR |
| | | MLTFKFYMPKKATELKHLQCLEEELKPLEEVLNLAQSKNFHLRPRDLISNI |
| | | NVIVLELKGSETTFMCEYADETATIVEFLNRWITFCQSIISTLT |
| SEQ ID | aCSF1R | SLVLTQPPSVSVAPGKTARITCGGNNIGSKSVHWYQQKPGQAPVLVVYDDS |
| NO: | BI123 VL- | DRPSGIPERFSGSNSGNTATLTISRVEAGDEADYYCQVWDSSSDHVVFGGG |
| 379 | hCLIg_v1- | TQLTVLGQPKANPTVTLFPPSSEELQANKATLVCLISDFYPGAVTVAWKAD |
| | 3 x 4GS-IL2 | GSPVKAGVETTKPSKQSNNKYAASSYLSLTPEQWKSHRSYSCQVTHEGSTV |
| | | EKTVAPTECSGGGGSGGGGSGGGGSAPTSSSTKKTQLQLEHLLLDLQMILN |
| | | GINNYKNPKLTRMLTFKFYMPKKATELKHLQCLEEELKPLEEVLNLAQSKN |
| | | FHLRPRDLISNINVIVLELKGSETTFMCEYADETATIVEFLNRWITFCQSI |
| | | ISTLT |
| SEQ ID | aCSF1R | SLVLTQPPSVSVAPGKTARITCGGNNIGSKSVHWYQQKPGQAPVLVVYDDS |
| NO: | BI123 VL- | DRPSGIPERFSGSNSGNTATLTISRVEAGDEADYYCQVWDSSSDHVVFGGG |
| 380 | hCLIg_v1- | TQLTVLGQPKANPTVTLFPPSSEELQANKATLVCLISDFYPGAVTVAWKAD |
| | IL2 | GSPVKAGVETTKPSKQSNNKYAASSYLSLTPEQWKSHRSYSCQVTHEGSTV |
| | | EKTVAPTECSAPTSSSTKKTQLQLEHLLLDLQMILNGINNYKNPKLTRMLT |
| | | FKFYMPKKATELKHLQCLEEELKPLEEVLNLAQSKNFHLRPRDLISNINVI |
| | | VLELKGSETTFMCEYADETATIVEFLNRWITFCQSIISTLT |
| SEQ ID | aCCR2 | DVVMTQSPLSLPVTLGQPASISCKSSQSLLDSDGKTFLNWLQQRPGQSPRR |
| NO: | VL- | LIYLVSKLDSGVPDRFSGSGSGTDFTLKISRVEAEDVGVYYCWQGTHFPYT |
| 381 | hCLIg_vk- | FGGGTKVEIKRTVAAPSVFIFPPSDEQLKSGTASVVCLLNNFYPREAKVQW |
| | 3 x 4GS-IL2 | KVDNALQSGNSQESVIEQDSKDSTYSLSSTLTLSKADYEKHKVYACEVTHQ |
| | | GLSSPVTKSFNRGECGGGGSGGGGSGGGGSAPTSSSTKKTQLQLEHLLLDL |
| | | QMILNGINNYKNPKLTRMLTFKFYMPKKATELKHLQCLEEELKPLEEVLNL |
| | | AQSKNFHLRPRDLISNINVIVLELKGSETTFMCEYADETATIVEFLNRWIT |
| | | FCQSIISTLT |
| SEQ ID | aCCR2 | DVVMTQSPLSLPVTLGQPASISCKSSQSLLDSDGKTFLNWLQQRPGQSPRR |
| NO: | VL- | LIYLVSKLDSGVPDRFSGSGSGTDFTLKISRVEAEDVGVYYCWQGTHFPYT |
| 382 | hCLIg_vk- | FGGGTKVEIKRTVAAPSVFIFPPSDEQLKSGTASVVCLLNNFYPREAKVQW |
| | IL2 | KVDNALQSGNSQESVIEQDSKDSTYSLSSTLTLSKADYEKHKVYACEVTHQ |
| | | GLSSPVTKSFNRGECAPTSSSTKKTQLQLEHLLLDLQMILNGINNYKNPKL |
| | | TRMLTFKFYMPKKATELKHLQCLEEELKPLEEVLNLAQSKNFHLRPRDLIS |
| | | NINVIVLELKGSETTFMCEYADETATIVEFLNRWITFCQSIISTLT |
| SEQ ID | aCSF1R | EVQLVESGGGLVQPGGSLRLSCAASGFTFSNDEMNWIRQAPGKGLEWVSYI |
| NO: | BI117 VH- | SSRSSTIYYADAVKGRFTISRDNARNSLYLQMNSLRAEDTAVYYCARGVDG |
| 383 | hCH1- | DFSFDYWGQGTLVTVSSASTKGPSVFPLAPSSKSTSGGTAALGCLVKDYFP |
| | hFc_Hole- | EPVTVSWNSGALTSGVHTFPAVLQSSGLYSLSSVVTVPSSSLGTQTYICNV |
| | 3 x 4GS- | NHKPSNTKVDKRVEPKSCDKTHTCPPCPAPELLGGPSVFLFPPKPKDTLMI |
| | TGFbR2 | SRTPEVTCVVVDVSHEDPEVKFNWYVDGVEVHNAKTKPREEQYNSTYRVVS |
| | | VLTVLHQDWLNGKEYKCKVSNKALPAPIEKTISKAKGQPREPQVCTLPPSR |
| | | EEMTKNQVSLSCAVKGFYPSDIAVEWESNGQPENNYKTTPPVLDSDGSFFL |
| | | VSKLTVDKSRWQQGNVFSCSVMHEALHNHYTQKSLSLSPGXGGGGSGGGGS |
| | | GGGGSIPPHVQKSVNNDMIVTDNNGAVKFPQLCKFCDVRFSTCDNQKSCMS |
| | | NCSITSICEKPQEVCVAVWRKNDENITLETVCHDPKLPYHDFILEDAASPK |
| | | CIMKEKKKPGETFFMCSCSSDECNDNIIFSEEYNTSNPD, wherein X |
| | | is K or absent |
| SEQ ID | aCSF1R | QVQLVQSGGGVVQPGRSLRLSCAASGFTFSSYAMHWVRQAPGKGLEWVAVI |
| NO: | BI123 VH- | SYDGSNKYYADSVKGRFTISRDNSKNTLYLQMNSLRAEDTAVYYCARELDY |
| 384 | hCH 1- | GDYGLDVWGKGTTVTVSSASTKGPSVFPLAPSSKSTSGGTAALGCLVKDYF |
| | hFc_Hole- | PEPVTVSWNSGALTSGVHTFPAVLQSSGLYSLSSVVTVPSSSLGTQTYICN |
| | 3 x 4GS- | VNHKPSNTKVDKRVEPKSCDKTHTCPPCPAPELLGGPSVFLFPPKPKDTLM |
| | TGFbR2 | ISRTPEVTCVVVDVSHEDPEVKFNWYVDGVEVHNAKTKPREEQYNSTYRVV |
| | | SVLTVLHQDWLNGKEYKCKVSNKALPAPIEKTISKAKGQPREPQVCTLPPS |
| | | REEMTKNQVSLSCAVKGFYPSDIAVEWESNGQPENNYKTTPPVLDSDGSFF |
| | | LVSKLTVDKSRWQQGNVFSCSVMHEALHNHYTQKSLSLSPGXGGGGSGGGG |
| | | SGGGGSIPPHVQKSVNNDMIVTDNNGAVKFPQLCKFCDVRFSTCDNQKSCM |
| | | SNCSITSICEKPQEVCVAVWRKNDENITLETVCHDPKLPYHDFILEDAASP |
| | | KCIMKEKKKPGETFFMCSCSSDECNDNIIFSEEYNTSNPD, wherein X |
| | | is K or absent |
| SEQ ID | aCCR2 | EVQLVESGGGLVKPGGSLRLSCAASGFSFNAYAMNWVRQAPGKGLEWVGRI |
| NO: | Hum1 VH- | RTKNNNYATYYADSVKDRFTISRDDSKSTLYLQMNSLKTEDTAVYYCTTFY |
| 385 | hCH 1- | GNGVWGQGTTVTVSSASTKGPSVFPLAPSSKSTSGGTAALGCLVKDYFPEP |
| | hFc_Knob- | VTVSWNSGALTSGVHTFPAVLQSSGLYSLSSVVTVPSSSLGTQTYICNVNH |
| | 3 x 4GS- | KPSNTKVDKRVEPKSCDKTHTCPPCPAPELLGGPSVFLFPPKPKDTLMISR |
| | TGFbR2 | TPEVTCVVVDVSHEDPEVKFNWYVDGVEVHNAKTKPREEQYNSTYRVVSVL |
| | | TVLHQDWLNGKEYKCKVSNKALPAPIEKTISKAKGQPREPQVYTLPPCREE |
| | | MTKNQVSLWCLVKGFYPSDIAVEWESNGQPENNYKTTPPVLDSDGSFFLYS |
| | | KLTVDKSRWQQGNVFSCSVMHEALHNHYTQKSLSLSPGXGGGGSGGGGSGG |
| | | GGSIPPHVQKSVNNDMIVTDNNGAVKFPQLCKFCDVRFSTCDNQKSCMSNC |
| | | SITSICEKPQEVCVAVWRKNDENITLETVCHDPKLPYHDFILEDAASPKCI |
| | | MKEKKKPGETFFMCSCSSDECNDNIIFSEEYNTSNPD, wherein X is |
| | | K or absent |
| SEQ ID | aCSF1R | EVQLVESGGGLVQPGGSLRLSCAASGFTFSNDEMNWIRQAPGKGLEWVSYI |
| NO: | BI117 VH- | SSRSSTIYYADAVKGRFTISRDNARNSLYLQMNSLRAEDTAVYYCARGVDG |
| 386 | 3 x 4GS- | DFSFDYWGQGTLVTVSSGGGGSGGGGSGGGGSQLVLTQPPSVSGAPGQRVT |
| | aCSF1R | ISCTGSSSNIGAGYDVHWYQQLPGTAPKLLIYGNSNRPSGVPDRFSGSKSG |
| | BI117 VL- | TSASLAITGLQAEDEADYYCQSYDSSLSEEVFGGGTKLTVLGGGGSDKTHT |
| | 4GS- | CPPCPAPELLGGPSVFLFPPKPKDTLMISRTPEVTCVVVDVSHEDPEVKFN |
| | hFc_Hole | WYVDGVEVHNAKTKPREEQYNSTYRVVSVLTVLHQDWLNGKEYKCKVSNKA |
| | | LPAPIEKTISKAKGQPREPQVCTLPPSREEMTKNQVSLSCAVKGFYPSDIA |
| | | VEWESNGQPENNYKTTPPVLDSDGSFFLVSKLTVDKSRWQQGNVFSCSVMH |
| | | EALHNHYTQKSLSLSPGX, wherein X is K or absent |
| SEQ ID | aCSF1R | QVQLVQSGGGVVQPGRSLRLSCAASGFTFSSYAMHWVRQAPGKGLEWVAVI |
| NO: | BI123 VH- | SYDGSNKYYADSVKGRFTISRDNSKNTLYLQMNSLRAEDTAVYYCARELDY |
| 387 | 3 x 4GS- | GDYGLDVWGKGTTVTVSSGGGGSGGGGSGGGGSSLVLTQPPSVSVAPGKTA |
| | aCSF1R | RITCGGNNIGSKSVHWYQQKPGQAPVLVVYDDSDRPSGIPERFSGSNSGNT |
| | BI123 VL- | ATLTISRVEAGDEADYYCQVWDSSSDHVVFGGGTQLTVLGGGGSDKTHTCP |
| | 4GS- | PCPAPELLGGPSVFLFPPKPKDTLMISRTPEVTCVVVDVSHEDPEVKFNWY |
| | hFc_Hole | VDGVEVHNAKTKPREEQYNSTYRVVSVLTVLHQDWLNGKEYKCKVSNKALP |
| | | APIEKTISKAKGQPREPQVCTLPPSREEMTKNQVSLSCAVKGFYPSDIAVE |
| | | WESNGQPENNYKTTPPVLDSDGSFFLVSKLTVDKSRWQQGNVFSCSVMHEA |
| | | LHNHYTQKSLSLSPGX, wherein X is K or absent |
| SEQ ID | aCSF1R | EVQLVESGGGLVQPGGSLRLSCAASGFTFSNDEMNWIRQAPGKGLEWVSYI |
| NO: | BI117 VH- | SSRSSTIYYADAVKGRFTISRDNARNSLYLQMNSLRAEDTAVYYCARGVDG |
| 388 | 3 x 4GS- | DFSFDYWGQGTLVTVSSGGGGSGGGGSGGGGSQLVLTQPPSVSGAPGQRVT |
| | aCSF1R | ISCTGSSSNIGAGYDVHWYQQLPGTAPKLLIYGNSNRPSGVPDRFSGSKSG |
| | BI117 VL- | TSASLAITGLQAEDEADYYCQSYDSSLSEEVFGGGTKLTVLGGGGSDKTHT |
| | 4GS- | CPPCPAPELLGGPSVFLFPPKPKDTLMISRTPEVTCVVVDVSHEDPEVKFN |
| | hFc_Hole- | WYVDGVEVHNAKTKPREEQYNSTYRVVSVLTVLHQDWLNGKEYKCKVSNKA |
| | 3 x 4GS- | LPAPIEKTISKAKGQPREPQVCTLPPSREEMTKNQVSLSCAVKGFYPSDIA |
| | TGFbR2 | VEWESNGQPENNYKTTPPVLDSDGSFFLVSKLTVDKSRWQQGNVFSCSVMH |
| | | EALHNHYTQKSLSLSPGXGGGGSGGGGSGGGGSIPPHVQKSVNNDMIVTDN |
| | | NGAVKFPQLCKFCDVRFSTCDNQKSCMSNCSITSICEKPQEVCVAVWRKND |
| | | ENITLETVCHDPKLPYHDFILEDAASPKCIMKEKKKPGETFFMCSCSSDEC |
| | | NDNIIFSEEYNTSNPD, wherein X is K or absent |
| SEQ ID | aCSF1R | QVQLVQSGGGVVQPGRSLRLSCAASGFTFSSYAMHWVRQAPGKGLEWVAVI |
| NO: | BI123 VH- | SYDGSNKYYADSVKGRFTISRDNSKNTLYLQMNSLRAEDTAVYYCARELDY |
| 389 | 3 x 4GS- | GDYGLDVWGKGTTVTVSSGGGGSGGGGSGGGGSSLVLTQPPSVSVAPGKTA |
| | aCSF1R | RITCGGNNIGSKSVHWYQQKPGQAPVLVVYDDSDRPSGIPERFSGSNSGNT |
| | BI123 VL- | ATLTISRVEAGDEADYYCQVWDSSSDHVVFGGGTQLTVLGGGGSDKTHTCP |
| | 4GS- | PCPAPELLGGPSVFLFPPKPKDTLMISRTPEVTCVVVDVSHEDPEVKFNWY |
| | hFc_Hole- | VDGVEVHNAKTKPREEQYNSTYRVVSVLTVLHQDWLNGKEYKCKVSNKALP |
| | 3 x 4GS- | APIEKTISKAKGQPREPQVCTLPPSREEMTKNQVSLSCAVKGFYPSDIAVE |
| | TGFbR2 | WESNGQPENNYKTTPPVLDSDGSFFLVSKLTVDKSRWQQGNVFSCSVMHEA |
| | | LHNHYTQKSLSLSPGXGGGGSGGGGSGGGGSIPPHVQKSVNNDMIVTDNNG |
| | | AVKFPQLCKFCDVRFSTCDNQKSCMSNCSITSICEKPQEVCVAVWRKNDEN |
| | | ITLETVCHDPKLPYHDFILEDAASPKCIMKEKKKPGETFFMCSCSSDECND |
| | | NIIFSEEYNTSNPD, wherein X is K or absent |
| SEQ ID | TGFbR2- | IPPHVQKSVNNDMIVTDNNGAVKFPQLCKFCDVRFSTCDNQKSCMSNCSIT |
| NO: | 3 x 4GS- | SICEKPQEVCVAVWRKNDENITLETVCHDPKLPYHDFILEDAASPKCIMKE |
| 390 | hCH1- | KKKPGETFFMCSCSSDECNDNIIFSEEYNTSNPDGGGGSGGGGSGGGGSAS |
| | hFc_Hole | TKGPSVFPLAPSSKSTSGGTAALGCLVKDYFPEPVTVSWNSGALTSGVHTF |
| | | PAVLQSSGLYSLSSVVTVPSSSLGTQTYICNVNHKPSNTKVDKRVEPKSCD |
| | | KTHTCPPCPAPELLGGPSVFLFPPKPKDTLMISRTPEVTCVVVDVSHEDPE |
| | | VKFNWYVDGVEVHNAKTKPREEQYNSTYRVVSVLTVLHQDWLNGKEYKCKV |
| | | SNKALPAPIEKTISKAKGQPREPQVCTLPPSREEMTKNQVSLSCAVKGFYP |
| | | SDIAVEWESNGQPENNYKTTPPVLDSDGSFFLVSKLTVDKSRWQQGNVFSC |
| | | SVMHEALHNHYTQKSLSLSPGX, wherein X is K or absent |
| SEQ ID | TGFbR2- | IPPHVQKSVNNDMIVTDNNGAVKFPQLCKFCDVRFSTCDNQKSCMSNCSIT |
| NO: | 3 x 4GS- | SICEKPQEVCVAVWRKNDENITLETVCHDPKLPYHDFILEDAASPKCIMKE |
| 391 | hCLIg_v1 | KKKPGETFFMCSCSSDECNDNIIFSEEYNTSNPDGGGGSGGGGSGGGGSGQ |
| | | LPKANPTVTFPPSSEELQANKATLVCLISDFYPGAVTVAWKADGSPVKAGV |
| | | ETTKPSKQSNNKYAASSYLSLTPEQWKSHRSYSCQVTHEGSTVEKTVAPTE |
| | | CS |
| SEQ ID | aCCR2 | EVQLVESGGGLVKPGGSLRLSCAASGFSFNAYAMNWVRQAPGKGLEWVGRI |
| NO: | Hum1 VH- | RTKNNNYATYYADSVKDRFTISRDDSKSTLYLQMNSLKTEDTAVYYCTTFY |
| 392 | hCH1- | GNGVWGQGTTVTVSSASTKGPSVFPLAPSSKSTSGGTAALGCLVKDYFPEP |
| | hFc_Knob- | VTVSWNSGALTSGVHTFPAVLQSSGLYSLSSVVTVPSSSLGTQTYICNVNH |
| | 3 x 4GS- | KPSNTKVDKRVEPKSCDKTHTCPPCPAPELLGGPSVFLFPPKPKDTLMISR |
| | BI117 VH- | TPEVTCVVVDVSHEDPEVKFNWYVDGVEVHNAKTKPREEQYNSTYRVVSVL |
| | 3 x 4GS- | TVLHQDWLNGKEYKCKVSNKALPAPIEKTISKAKGQPREPQVYTLPPCREE |
| | aCSF1R | MTKNQVSLWCLVKGFYPSDIAVEWESNGQPENNYKTTPPVLDSDGSFFLYS |
| | BI117 VL | KLTVDKSRWQQGNVFSCSVMHEALHNHYTQKSLSLSPGXGGGGSGGGGSGG |
| | | GGSEVQLVESGGGLVQPGGSLRLSCAASGFTFSNDEMNWIRQAPGKGLEWV |
| | | SYISSRSSTIYYADAVKGRFTISRDNARNSLYLQMNSLRAEDTAVYYCARG |
| | | VDGDFSFDYWGQGTLVTVSSGGGGSGGGGSGGGGSQLVLTQPPSVSGAPGQ |
| | | RVTISCTGSSSNIGAGYDVHWYQQLPGTAPKLLIYGNSNRPSGVPDRFSGS |
| | | KSGTSASLAITGLQAEDEADYYCQSYDSSLSEEVFGGGTKLTVL, |
| | | wherein X is K or absent |
| SEQ ID | aCCR2 | EVQLVESGGGLVQPGGSLRLSCAASGFSFNAYAMNWVRQAPGKGLEWVGRI |
| NO: | Hum1 VH- | RTKNNNYATYYADSVKDRFTISRDDSKSSLYLQMNSLK1EDTAVYYCATFY |
| 393 | hCH1- | GNGVWGQGTTVTVSSASTKGPSVFPLAPSSKSTSGGTAALGCLVKDYFPEP |
| | hFc_Knob- | VTVSWNSGALTSGVHTFPAVLQSSGLYSLSSVVTVPSSSLGTQTYICNVNH |
| | 3 x 4GS- | KPSNTKVDKRVEPKSCDKTHTCPPCPAPELLGGPSVFLFPPKPKDTLMISR |
| | BI123 VH- | TPEVTCVVVDVSHEDPEVKFNWYVDGVEVHNAKTKPREEQYNSTYRVVSVL |
| | 3 x 4GS- | TVLHQDWLNGKEYKCKVSNKALPAPIEKTISKAKGQPREPQVYTLPPCREE |
| | aCSF1R | MTKNQVSLWCLVKGFYPSDIAVEWESNGQPENNYKTTPPVLDSDGSFFLYS |
| | BI123 VL | KLTVDKSRWQQGNVFSCSVMHEALHNHYTQKSLSLSPGXGGGGSGGGGSGG |
| | | GGSQVQLVQSGGGVVQPGRSLRLSCAASGFTFSSYAMHWVRQAPGKGLEWV |
| | | AVISYDGSNKYYADSVKGRFTISRDNSKNTLYLQMNSLRAEDTAVYYCARE |
| | | LDYGDYGLDVWGKGTTVTVSSGGGGSGGGGSGGGGSSLVLTQPPSVSVAPG |
| | | KTARITCGGNNIGSKSVHWYQQKPGQAPVLVVYDDSDRPSGIPERFSGSNS |
| | | GNTATLTISRVEAGDEADYYCQVWDSSSDHVVFGGGTQLTVL, wherein |
| | | X is K or absent |
| SEQ ID | hFc-Knob | DKTHTCPPCPAPELLGGPSVFLFPPKPKDTLMISRTPEVTCVVVDVSHEDP |
| NO: | (H435R, | EVKFNWYVDGVEVHNAKTKPREEQYNSTYRVVSVLTVLHQDWLNGKEYKCK |
| 401 | Y436F)_his | VSNKALPAPIEKTISKAKGQPREPQVYTLPPCREEMTKNQVSLWCLVKGFY |
| | tag | PSDIAVEWESNGQPENNYKTTPPVLDSDGSFFLYSKLTVDKSRWQQGNVFS |
| | | CSVMHEALHNRFTQKSLSLSPGKGGGGSGGGGSHHHHHHHH |
| SEQ ID | hTGFbR2 | MGRGLLRGLWPLHIVLWTRIAST |
| NO: | signal | |
| 348 | peptide | |
| SEQ ID | 3 × 4GS | GGGGSGGGGSGGGGS |
| NO: | linker | |
| 349 | | |
| SEQ ID | 4GS linker | GGGGS |
| NO: | | |
| 350 | | |
| SEQ ID | 2 × 4GS | GGGGSGGGGS |
| NO: | linker | |
| 398 | | |
| SEQ ID | hFc_Knob | DKTHTCPPCPAPELLGGPSVFLFPPKPKDTLMISRTPEVTCVVVDVSHEDP |
| NO: | (H435R, | EVKFNWYVDGVEVHNAKTKPREEQYNSTYRVVSVLTVLHQDWLNGKEYKCK |
| 399 | Y436F) | VSNKALPAPIEKTISKAKGQPREPQVYTLPPCREEMTKNQVSLWCLVKGFY |
| | | PSDIAVEWESNGQPENNYKTTPPVLDSDGSFFLYSKLTVDKSRWQQGNVFS |
| | | CSVMHEALHNRFTQKSLSLSPGK |
| SEQ ID | 8 × His | HHHHHHHH |
| NO: | | |
| 400 | | |
| SEQ ID | aCSF1R | ATGGAAACCGACACACTGCTGCTGTGGGTGCTGCTCTTGTGGGTGCCAGGA |
| NO: | BI117 VH- | TCTACAGGAGAAGTGCAGCTGGTCGAAAGCGGAGGGGGTCTGGTCCAGCCT |
| 280 | hCH1- | GGAGGGTCCCTGCGGCTGTCCTGCGCCGCTTCCGGCTTCACCTTCTCCAAC |
| | hFc_Hole | GATGAAATGAACTGGATCCGCCAAGCCCCTGGAAAGGGCCTGGAATGGGTG |
| | | TCGTACATCTCGAGCAGGTCCAGCACTATCTACTATGCCGACGCGGTGAAG |
| | | GGACGCTTCACTATCAGCCGCGATAACGCACGCAATTCCCTCTACCTGCAG |
| | | ATGAACTCGCTCAGAGCTGAGGATACTGCCGTCTACTACTGCGCCCGCGGC |
| | | GTGGACGGCGATTTTTCCTTCGATTACTGGGGACAGGGCACTCTTGTCACC |
| | | GTGTCAAGCGCTTCTACCAAGGGACCCAGCGTGTTCCCTCTGGCTCCTTCC |
| | | AGCAAGTCTACCTCTGGCGGAACAGCTGCTCTGGGCTGCCTGGTCAAGGAC |
| | | TACTTTCCTGAGCCTGTGACCGTGTCTTGGAACTCTGGCGCTCTGACATCC |
| | | GGCGTGCACACATTTCCAGCTGTGCTGCAGTCCTCCGGCCTGTACTCTCTG |
| | | TCCTCTGTCGTGACCGTGCCTTCCAGCTCTCTGGGAACCCAGACCTACATC |
| | | TGCAATGTGAACCACAAGCCTTCCAACACCAAGGTGGACAAGAGAGTGGAA |
| | | CCCAAGTCCTGCGATAAGACCCACACCTGTCCTCCCTGCCCTGCCCCTGAA |
| | | CTGCTGGGCGGACCTAGCGTGTTCCTGTTCCCTCCAAAGCCCAAGGACACC |
| | | CTGATGATCAGCCGGACCCCTGAAGTGACCTGCGTGGTGGTGGATGTGTCC |
| | | CACGAGGATCCCGAAGTGAAGTTCAATTGGTACGTGGACGGCGTGGAAGTG |
| | | CACAACGCCAAGACCAAGCCCAGAGAGGAACAGTACAACAGCACCTACCGG |
| | | GTGGTGTCCGTGCTGACCGTGCTGCACCAGGACTGGCTGAACGGCAAAGAG |
| | | TACAAGTGCAAGGTGTCCAACAAGGCCCTGCCAGCCCCTATCGAGAAAACC |
| | | ATCAGCAAGGCCAAGGGCCAGCCTAGAGAGCCTCAGGTCTGCACCCTGCCT |
| | | CCCAGCCGGGAAGAGATGACCAAGAACCAGGTGTCCCTGAGCTGCGCCGTG |
| | | AAGGGCTTCTACCCCTCCGATATCGCCGTGGAATGGGAGAGCAACGGCCAG |
| | | CCCGAGAACAACTACAAGACCACCCCTCCCGTGCTGGACAGCGACGGCAGC |
| | | TTCTTCCTGGTGTCCAAACTGACCGTGGACAAGAGCCGGTGGCAGCAGGGC |
| | | AATGTGTTCAGCTGTAGCGTGATGCACGAGGCCCTGCACAACCACTACACC |
| | | CAGAAGTCTCTGAGCCTGAGCCCTGGCAAA |
| SEQ ID | aCSF1R | ATGGAAACCGACACACTGCTGCTGTGGGTGCTGCTCTTGTGGGTGCCAGGA |
| NO: | BI117 C5- | TCTACAGGAGAAGTCCAACTCGTGGAAAGCGGCGGTGGCCTGGTGCAGCCG |
| 281 | R2A VH- | GGAGGCTCCCTCCGGCTGTCGTGTGCAGCCAGCGGGTTCACCTTCTCCAAC |
| | hCH1- | GACGAAATGAACTGGATTCGCCAGGCGCCGGGAAAGGGGCTGGAATGGGTG |
| | hFc_Hole | TCGTACATTTCAAGCGGGTCCTCCACCATTTACTACGCCGATGCAGTCAAG |
| | | GGCCGCTTCACCATCTCGCGCGACAACGCTCGGAACTCCCTCTATCTGCAG |
| | | ATGAACAGCCTGAGAGCGGAAGACACCGCCGTCTACTACTGCGCCCGCGGA |
| | | GTGGACGGCGACTTCTCCTTCGACTACTGGGGTCAGGGAACCCTGGTGACT |
| | | GTGTCCTCAGCTTCTACCAAGGGACCCAGCGTGTTCCCTCTGGCTCCTTCC |
| | | AGCAAGTCTACCTCTGGCGGAACAGCTGCTCTGGGCTGCCTGGTCAAGGAC |
| | | TACTTTCCTGAGCCTGTGACCGTGTCTTGGAACTCTGGCGCTCTGACATCC |
| | | GGCGTGCACACATTTCCAGCTGTGCTGCAGTCCTCCGGCCTGTACTCTCTG |
| | | TCCTCTGTCGTGACCGTGCCTTCCAGCTCTCTGGGAACCCAGACCTACATC |
| | | TGCAATGTGAACCACAAGCCTTCCAACACCAAGGTGGACAAGAGAGTGGAA |
| | | CCCAAGTCCTGCGATAAGACCCACACCTGTCCTCCCTGCCCTGCCCCTGAA |
| | | CTGCTGGGCGGACCTAGCGTGTTCCTGTTCCCTCCAAAGCCCAAGGACACC |
| | | CTGATGATCAGCCGGACCCCTGAAGTGACCTGCGTGGTGGTGGATGTGTCC |
| | | CACGAGGATCCCGAAGTGAAGTTCAATTGGTACGTGGACGGCGTGGAAGTG |
| | | CACAACGCCAAGACCAAGCCCAGAGAGGAACAGTACAACAGCACCTACCGG |
| | | GTGGTGTCCGTGCTGACCGTGCTGCACCAGGACTGGCTGAACGGCAAAGAG |
| | | TACAAGTGCAAGGTGTCCAACAAGGCCCTGCCAGCCCCTATCGAGAAAACC |
| | | ATCAGCAAGGCCAAGGGCCAGCCTAGAGAGCCTCAGGTCTGCACCCTGCCT |
| | | CCCAGCCGGGAAGAGATGACCAAGAACCAGGTGTCCCTGAGCTGCGCCGTG |
| | | AAGGGCTTCTACCCCTCCGATATCGCCGTGGAATGGGAGAGCAACGGCCAG |
| | | CCCGAGAACAACTACAAGACCACCCCTCCCGTGCTGGACAGCGACGGCAGC |
| | | TTCTTCCTGGTGTCCAAACTGACCGTGGACAAGAGCCGGTGGCAGCAGGGC |
| | | AATGTGTTCAGCTGTAGCGTGATGCACGAGGCCCTGCACAACCACTACACC |
| | | CAGAAGTCTCTGAGCCTGAGCCCTGGCAAA |
| SEQ ID | aCSF1R | ATGGAAACCGACACACTGCTGCTGTGGGTGCTGCTCTTGTGGGTGCCAGGA |
| NO: | BI117 C9- | TCTACAGGAGAGGTGCAGCTGGTGGAATCGGGGGGTGGCCTCGTGCAGCCC |
| 282 | R2A VH- | GGAGGGTCGCTCCGGCTGTCCTGTGCCGCTAGCGGATTCACATTCTCGAAT |
| | hCH1- | GACGAGATGAACTGGATTCGGCAGGCCCCAGGCAAGGGCCTGGAATGGGTG |
| | hFc_Hole | AGCTTCATTTCGGGCGGGTCCTCAACCATCTACTACGCCGACGCCGTCAAG |
| | | GGGCGCTTTACTATCTCCCGCGACAATGCACGGAACTCCCTCTACCTGCAA |
| | | ATGAACAGCCTGAGGGCGGAAGATACAGCTGTGTACTACTGCGCCCGGGGC |
| | | GTGGACGGAGACTTCTCCTTCGACTACTGGGGTCAGGGAACCCTGGTGACA |
| | | GTGTCTTCCGCTTCTACCAAGGGACCCAGCGTGTTCCCTCTGGCTCCTTCC |
| | | AGCAAGTCTACCTCTGGCGGAACAGCTGCTCTGGGCTGCCTGGTCAAGGAC |
| | | TACTTTCCTGAGCCTGTGACCGTGTCTTGGAACTCTGGCGCTCTGACATCC |
| | | TGGCGGCACACATTTCCAGCTGTGCTGCAGTCCTCCGGCCTGTACTCTCTG |
| | | TCCTCTGTCGTGACCGTGCCTTCCAGCTCTCTGGGAACCCAGACCTACATC |
| | | TGCAATGTGAACCACAAGCCTTCCAACACCAAGGTGGACAAGAGAGTGGAA |
| | | CCCAAGTCCTGCGATAAGACCCACACCTGTCCTCCCTGCCCTGCCCCTGAA |
| | | CTGCTGGGCGGACCTAGCGTGTTCCTGTTCCCTCCAAAGCCCAAGGACACC |
| | | CTGATGATCAGCCGGACCCCTGAAGTGACCTGCGTGGTGGTGGATGTGTCC |
| | | CACGAGGATCCCGAAGTGAAGTTCAATTGGTACGTGGACGGCGTGGAAGTG |
| | | CACAACGCCAAGACCAAGCCCAGAGAGGAACAGTACAACAGCACCTACCGG |
| | | GTGGTGTCCGTGCTGACCGTGCTGCACCAGGACTGGCTGAACGGCAAAGAG |
| | | TACAAGTGCAAGGTGTCCAACAAGGCCCTGCCAGCCCCTATCGAGAAAACC |
| | | ATCAGCAAGGCCAAGGGCCAGCCTAGAGAGCCTCAGGTCTGCACCCTGCCT |
| | | CCCAGCCGGGAAGAGATGACCAAGAACCAGGTGTCCCTGAGCTGCGCCGTG |
| | | AAGGGCTTCTACCCCTCCGATATCGCCGTGGAATGGGAGAGCAACGGCCAG |
| | | CCCGAGAACAACTACAAGACCACCCCTCCCGTGCTGGACAGCGACGGCAGC |
| | | TTCTTCCTGGTGTCCAAACTGACCGTGGACAAGAGCCGGTGGCAGCAGGGC |
| | | AATGTGTTCAGCTGTAGCGTGATGCACGAGGCCCTGCACAACCACTACACC |
| | | CAGAAGTCTCTGAGCCTGAGCCCTGGCAAA |
| SEQ ID | aCSF1R | ATGGAAACCGACACACTGCTGCTGTGGGTGCTGCTCTTGTGGGTGCCAGGA |
| NO: | BI117 D1- | TCTACAGGAGAAGTGCAGCTCGTGGAGTCTGGAGGTGGTCTGGTGCAGCCG |
| 283 | R2A VH- | GGTGGTTCCCTGAGGCTGTCCTGCGCCGCCAGCGGCTTCACCTTCTCAAAT |
| | hCH1- | GACGAAATGAACTGGATTCGGCAGGCCCCTGGCAAGGGCCTGGAGTGGGTG |
| | hFc_Hole | TCGTACATCTCCTCCCGCAGCTCCACCATCTACTACGCCGACGCAGTCAAG |
| | | GGGAGGTTCACCATCTCCCGGGACAACGCCCGGAACTCACTGTACCTGCAG |
| | | ATGAACTCCCTGAGAGCTGAGGACACTGCCGTCTACTACTGCGCTAGAAAC |
| | | TCCGATGAGGACGGAAGCTTCGACTACTGGGGCCAGGGAACTCTGGTGACA |
| | | GTCTCGAGCGCTTCTACCAAGGGACCCAGCGTGTTCCCTCTGGCTCCTTCC |
| | | AGCAAGTCTACCTCTGGCGGAACAGCTGCTCTGGGCTGCCTGGTCAAGGAC |
| | | TACTTTCCTGAGCCTGTGACCGTGTCTTGGAACTCTGGCGCTCTGACATCC |
| | | GGCGTGCACACATTTCCAGCTGTGCTGCAGTCCTCCGGCCTGTACTCTCTG |
| | | TCCTCTGTCGTGACCGTGCCTTCCAGCTCTCTGGGAACCCAGACCTACATC |
| | | TGCAATGTGAACCACAAGCCTTCCAACACCAAGGTGGACAAGAGAGTGGAA |
| | | CCCAAGTCCTGCGATAAGACCCACACCTGTCCTCCCTGCCCTGCCCCTGAA |
| | | CTGCTGGGCGGACCTAGCGTGTTCCTGTTCCCTCCAAAGCCCAAGGACACC |
| | | CTGATGATCAGCCGGACCCCTGAAGTGACCTGCGTGGTGGTGGATGTGTCC |
| | | CACGAGGATCCCGAAGTGAAGTTCAATTGGTACGTGGACGGCGTGGAAGTG |
| | | CACAACGCCAAGACCAAGCCCAGAGAGGAACAGTACAACAGCACCTACCGG |
| | | GTGGTGTCCGTGCTGACCGTGCTGCACCAGGACTGGCTGAACGGCAAAGAG |
| | | TACAAGTGCAAGGTGTCCAACAAGGCCCTGCCAGCCCCTATCGAGAAAACC |
| | | ATCAGCAAGGCCAAGGGCCAGCCTAGAGAGCCTCAGGTCTGCACCCTGCCT |
| | | CCCAGCCGGGAAGAGATGACCAAGAACCAGGTGTCCCTGAGCTGCGCCGTG |
| | | AAGGGCTTCTACCCCTCCGATATCGCCGTGGAATGGGAGAGCAACGGCCAG |
| | | CCCGAGAACAACTACAAGACCACCCCTCCCGTGCTGGACAGCGACGGCAGC |
| | | TTCTTCCTGGTGTCCAAACTGACCGTGGACAAGAGCCGGTGGCAGCAGGGC |
| | | AATGTGTTCAGCTGTAGCGTGATGCACGAGGCCCTGCACAACCACTACACC |
| | | CAGAAGTCTCTGAGCCTGAGCCCTGGCAAA |
| SEQ ID | aCSF1R | ATGGAAACCGACACACTGCTGCTGTGGGTGCTGCTCTTGTGGGTGCCAGGA |
| NO: | BI117 E2- | TCTACAGGAGAGGTGCAGCTCGTGGAAAGCGGGGGCGGCCTGGTCCAGCCT |
| 284 | R2B VH- | GGAGGATCCCTGAGACTTTCCTGTGCTGCTTCCGGGTTCACCTTCAGCAAT |
| | hCH1- | GATGAGATGAACTGGATTCGGCAAGCCCCGGGCAAGGGCCTGGAATGGGTC |
| | hFc_Hole | AGCTACATCACGTCTAAGTCCTCCACCATCTACTATGCCGACTCCGTGAAG |
| | | GGACGCTTTACCATCTCACGCGACAACGCGCGGAACAGCCTTTACCTGCAG |
| | | ATGAACTCACTGCGCGCCGAAGATACCGCCGTGTACTACTGCGCTCGCGGA |
| | | GTGGATGGAGATTTTTCCTTCGATTACTGGGGACAAGGCACCCTGGTGACC |
| | | GTCAGCTCCGCTTCTACCAAGGGACCCAGCGTGTTCCCTCTGGCTCCTTCC |
| | | AGCAAGTCTACCTCTGGCGGAACAGCTGCTCTGGGCTGCCTGGTCAAGGAC |
| | | TACTTTCCTGAGCCTGTGACCGTGTCTTGGAACTCTGGCGCTCTGACATCC |
| | | GGCGTGCACACATTTCCAGCTGTGCTGCAGTCCTCCGGCCTGTACTCTCTG |
| | | TCCTCTGTCGTGACCGTGCCTTCCAGCTCTCTGGGAACCCAGACCTACATC |
| | | TGCAATGTGAACCACAAGCCTTCCAACACCAAGGTGGACAAGAGAGTGGAA |
| | | CCCAAGTCCTGCGATAAGACCCACACCTGTCCTCCCTGCCCTGCCCCTGAA |
| | | CTGCTGGGCGGACCTAGCGTGTTCCTGTTCCCTCCAAAGCCCAAGGACACC |
| | | CTGATGATCAGCCGGACCCCTGAAGTGACCTGCGTGGTGGTGGATGTGTCC |
| | | CACGAGGATCCCGAAGTGAAGTTCAATTGGTACGTGGACGGCGTGGAAGTG |
| | | CACAACGCCAAGACCAAGCCCAGAGAGGAACAGTACAACAGCACCTACCGG |
| | | GTGGTGTCCGTGCTGACCGTGCTGCACCAGGACTGGCTGAACGGCAAAGAG |
| | | TACAAGTGCAAGGTGTCCAACAAGGCCCTGCCAGCCCCTATCGAGAAAACC |
| | | ATCAGCAAGGCCAAGGGCCAGCCTAGAGAGCCTCAGGTCTGCACCCTGCCT |
| | | CCCAGCCGGGAAGAGATGACCAAGAACCAGGTGTCCCTGAGCTGCGCCGTG |
| | | AAGGGCTTCTACCCCTCCGATATCGCCGTGGAATGGGAGAGCAACGGCCAG |
| | | CCCGAGAACAACTACAAGACCACCCCTCCCGTGCTGGACAGCGACGGCAGC |
| | | TTCTTCCTGGTGTCCAAACTGACCGTGGACAAGAGCCGGTGGCAGCAGGGC |
| | | AATGTGTTCAGCTGTAGCGTGATGCACGAGGCCCTGCACAACCACTACACC |
| | | CAGAAGTCTCTGAGCCTGAGCCCTGGCAAA |
| SEQ ID | aCSF1R | ATGGAAACCGACACACTGCTGCTGTGGGTGCTGCTCTTGTGGGTGCCAGGA |
| NO: | BI117 G1- | TCTACAGGAGAAGTCCAGCTCGTCGAATCTGGTGGGGGACTGGTCCAGCCG |
| 285 | R2B VH- | GGAGGATCCCTCCGGCTGTCGTGCGCGGCATCCGGGTTCACCTTCTCCAAC |
| | hCH1- | GATGAGATGAATTGGATTCGCCAGGCCCCAGGAAAGGGGCTGGAGTGGGTC |
| | hFc_Hole | TCGTACATCTCATCCCGCAGCTCTACTATCTACTACGCCGATGCTGTCAAG |
| | | GGCCGGTTCACTATCTCCCGCGATAACGCCCGGAACTCCCTCTACCTCCAG |
| | | ATGAACTCACTGCGCGCGGAAGACACCGCCGTCTACTACTGCGCACGGGGC |
| | | GTCGATGGAGATTTCTCCTTCGATGTGTGGGGTCAGGGAACACTGGTGACC |
| | | GTGTCCTCCGCTTCTACCAAGGGACCCAGCGTGTTCCCTCTGGCTCCTTCC |
| | | AGCAAGTCTACCTCTGGCGGAACAGCTGCTCTGGGCTGCCTGGTCAAGGAC |
| | | TACTTTCCTGAGCCTGTGACCGTGTCTTGGAACTCTGGCGCTCTGACATCC |
| | | GGCGTGCACACATTTCCAGCTGTGCTGCAGTCCTCCGGCCTGTACTCTCTG |
| | | TCCTCTGTCGTGACCGTGCCTTCCAGCTCTCTGGGAACCCAGACCTACATC |
| | | TGCAATGTGAACCACAAGCCTTCCAACACCAAGGTGGACAAGAGAGTGGAA |
| | | CCCAAGTCCTGCGATAAGACCCACACCTGTCCTCCCTGCCCTGCCCCTGAA |
| | | CTGCTGGGCGGACCTAGCGTGTTCCTGTTCCCTCCAAAGCCCAAGGACACC |
| | | CTGATGATCAGCCGGACCCCTGAAGTGACCTGCGTGGTGGTGGATGTGTCC |
| | | CACGAGGATCCCGAAGTGAAGTTCAATTGGTACGTGGACGGCGTGGAAGTG |
| | | CACAACGCCAAGACCAAGCCCAGAGAGGAACAGTACAACAGCACCTACCGG |
| | | GTGGTGTCCGTGCTGACCGTGCTGCACCAGGACTGGCTGAACGGCAAAGAG |
| | | TACAAGTGCAAGGTGTCCAACAAGGCCCTGCCAGCCCCTATCGAGAAAACC |
| | | ATCAGCAAGGCCAAGGGCCAGCCTAGAGAGCCTCAGGTCTGCACCCTGCCT |
| | | CCCAGCCGGGAAGAGATGACCAAGAACCAGGTGTCCCTGAGCTGCGCCGTG |
| | | AAGGGCTTCTACCCCTCCGATATCGCCGTGGAATGGGAGAGCAACGGCCAG |
| | | CCCGAGAACAACTACAAGACCACCCCTCCCGTGCTGGACAGCGACGGCAGC |
| | | TTCTTCCTGGTGTCCAAACTGACCGTGGACAAGAGCCGGTGGCAGCAGGGC |
| | | AATGTGTTCAGCTGTAGCGTGATGCACGAGGCCCTGCACAACCACTACACC |
| | | CAGAAGTCTCTGAGCCTGAGCCCTGGCAAA |
| SEQ ID | aCSF1R | ATGGAAACCGACACACTGCTGCTGTGGGTGCTGCTCTTGTGGGTGCCAGGA |
| NO: | BI117 | TCTACAGGAGAGGTGCAGCTCGTGGAGTCCGGTGGAGGACTGGTGCAGCCC |
| 286 | G12-R2B | GGCGGATCGCTGAGACTGTCTTGCGCCGCCTCGGGATTCACGTTCTCCAAC |
| | VH-hCH1- | GATGAAATGAACTGGATTAGACAGGCTCCGGGCAAGGGCCTGGAATGGGTG |
| | hFc_Hole | TCCTACATTACTTCGAAGTCCTCCACCATTTACTACGCAGACGCCGTGAAG |
| | | GGCCGCTTCACCATTTCCCGCGACAACGCAAGAAACTCGCTGTACCTGCAG |
| | | ATGAACTCCCTGCGCGCGGAGGACACCGCCGTGTACTACTGTGCCAGAGGA |
| | | GTCGATGGCGATTTCTCGTTCGACTACTGGGGACAGGGCACTCTTGTGACT |
| | | GTCTCCTCCGCTTCTACCAAGGGACCCAGCGTGTTCCCTCTGGCTCCTTCC |
| | | AGCAAGTCTACCTCTGGCGGAACAGCTGCTCTGGGCTGCCTGGTCAAGGAC |
| | | TACTTTCCTGAGCCTGTGACCGTGTCTTGGAACTCTGGCGCTCTGACATCC |
| | | GGCGTGCACACATTTCCAGCTGTGCTGCAGTCCTCCGGCCTGTACTCTCTG |
| | | TCCTCTGTCGTGACCGTGCCTTCCAGCTCTCTGGGAACCCAGACCTACATC |
| | | TGCAATGTGAACCACAAGCCTTCCAACACCAAGGTGGACAAGAGAGTGGAA |
| | | CCCAAGTCCTGCGATAAGACCCACACCTGTCCTCCCTGCCCTGCCCCTGAA |
| | | CTGCTGGGCGGACCTAGCGTGTTCCTGTTCCCTCCAAAGCCCAAGGACACC |
| | | CTGATGATCAGCCGGACCCCTGAAGTGACCTGCGTGGTGGTGGATGTGTCC |
| | | CACGAGGATCCCGAAGTGAAGTTCAATTGGTACGTGGACGGCGTGGAAGTG |
| | | CACAACGCCAAGACCAAGCCCAGAGAGGAACAGTACAACAGCACCTACCGG |
| | | GTGGTGTCCGTGCTGACCGTGCTGCACCAGGACTGGCTGAACGGCAAAGAG |
| | | TACAAGTGCAAGGTGTCCAACAAGGCCCTGCCAGCCCCTATCGAGAAAACC |
| | | ATCAGCAAGGCCAAGGGCCAGCCTAGAGAGCCTCAGGTCTGCACCCTGCCT |
| | | CCCAGCCGGGAAGAGATGACCAAGAACCAGGTGTCCCTGAGCTGCGCCGTG |
| | | AAGGGCTTCTACCCCTCCGATATCGCCGTGGAATGGGAGAGCAACGGCCAG |
| | | CCCGAGAACAACTACAAGACCACCCCTCCCGTGCTGGACAGCGACGGCAGC |
| | | TTCTTCCTGGTGTCCAAACTGACCGTGGACAAGAGCCGGTGGCAGCAGGGC |
| | | AATGTGTTCAGCTGTAGCGTGATGCACGAGGCCCTGCACAACCACTACACC |
| | | CAGAAGTCTCTGAGCCTGAGCCCTGGCAAA |
| SEQ ID | aCSF1R | ATGGAAACCGACACACTGCTGCTGTGGGTGCTGCTCTTGTGGGTGCCAGGA |
| NO: | BI117 D6- | TCTACAGGAGAGGTCCAGCTGGTCGAATCGGGGGGAGGCCTCGTGCAGCCT |
| 287 | R3B VH- | GGAGGGTCCCTCCGGCTTTCCTGTGCCGCTTCCGGATTCACCTTCAGCAAC |
| | hCH1- | GATGAGATGAACTGGATCAGGCAGGCCCCGGGAAAGGGGCTCGAGTGGGTG |
| | hFc_Hole | TCCTACATCTCCAGCCGGTCCTCGACCATCTACTACGCCGATGCCGTGAAG |
| | | GGGAGATTTACTATCTCCCGCGACAATGCACGGAACTCACTGTACCTCCAG |
| | | ATGAACTCACTGCGGGCCGAGGACACCGCAGTGTACTACTGCGCGCGGTCC |
| | | GTGGATGGCGACGGGAGCTTCGATTACTGGGGACAGGGGACCCTGGTGACC |
| | | GTGTCGTCCGCTTCTACCAAGGGACCCAGCGTGTTCCCTCTGGCTCCTTCC |
| | | AGCAAGTCTACCTCTGGCGGAACAGCTGCTCTGGGCTGCCTGGTCAAGGAC |
| | | TACTTTCCTGAGCCTGTGACCGTGTCTTGGAACTCTGGCGCTCTGACATCC |
| | | GGCGTGCACACATTTCCAGCTGTGCTGCAGTCCTCCGGCCTGTACTCTCTG |
| | | TCCTCTGTCGTGACCGTGCCTTCCAGCTCTCTGGGAACCCAGACCTACATC |
| | | TGCAATGTGAACCACAAGCCTTCCAACACCAAGGTGGACAAGAGAGTGGAA |
| | | CCCAAGTCCTGCGATAAGACCCACACCTGTCCTCCCTGCCCTGCCCCTGAA |
| | | CTGCTGGGCGGACCTAGCGTGTTCCTGTTCCCTCCAAAGCCCAAGGACACC |
| | | CTGATGATCAGCCGGACCCCTGAAGTGACCTGCGTGGTGGTGGATGTGTCC |
| | | CACGAGGATCCCGAAGTGAAGTTCAATTGGTACGTGGACGGCGTGGAAGTG |
| | | CACAACGCCAAGACCAAGCCCAGAGAGGAACAGTACAACAGCACCTACCGG |
| | | GTGGTGTCCGTGCTGACCGTGCTGCACCAGGACTGGCTGAACGGCAAAGAG |
| | | TACAAGTGCAAGGTGTCCAACAAGGCCCTGCCAGCCCCTATCGAGAAAACC |
| | | ATCAGCAAGGCCAAGGGCCAGCCTAGAGAGCCTCAGGTCTGCACCCTGCCT |
| | | CCCAGCCGGGAAGAGATGACCAAGAACCAGGTGTCCCTGAGCTGCGCCGTG |
| | | AAGGGCTTCTACCCCTCCGATATCGCCGTGGAATGGGAGAGCAACGGCCAG |
| | | CCCGAGAACAACTACAAGACCACCCCTCCCGTGCTGGACAGCGACGGCAGC |
| | | TTCTTCCTGGTGTCCAAACTGACCGTGGACAAGAGCCGGTGGCAGCAGGGC |
| | | AATGTGTTCAGCTGTAGCGTGATGCACGAGGCCCTGCACAACCACTACACC |
| | | CAGAAGTCTCTGAGCCTGAGCCCTGGCAAA |
| SEQ ID | aCSF1R | ATGGAAACCGACACACTGCTGCTGTGGGTGCTGCTCTTGTGGGTGCCAGGA |
| NO: | BI117 A6- | TCTACAGGAGAGGTGCAGCTCGTGGAATCCGGAGGTGGACTGGTGCAGCCG |
| 288 | R3B VH- | GGGGGTAGCCTGCGGCTGTCCTGTGCAGCTTCCGGGTTCACCTTCTCCAAC |
| | hCH1- | GACGAAATGAACTGGATCCGCCAGGCCCCGGGCAAGGGACTCGAATGGGTG |
| | hFc_Hole | TCCTACATCTCCTCCCGCTCCTCCACTATCTACTATGCCGATGCCGTCAAG |
| | | GGCCGCTTCACCATTTCTCGCGACAACGCCCGGAACTCCCTGTACCTCCAG |
| | | ATGAACTCCCTGCGCGCCGAGGACACTGCCGTCTACTACTGCGCGAGGTCG |
| | | TCCGACGGATCCACCTCCTTCGACTACTGGGGGCAAGGAACTCTCGTGACC |
| | | GTGTCCTCCGCTTCTACCAAGGGACCCAGCGTGTTCCCTCTGGCTCCTTCC |
| | | AGCAAGTCTACCTCTGGCGGAACAGCTGCTCTGGGCTGCCTGGTCAAGGAC |
| | | TACTTTCCTGAGCCTGTGACCGTGTCTTGGAACTCTGGCGCTCTGACATCC |
| | | GGCGTGCACACATTTCCAGCTGTGCTGCAGTCCTCCGGCCTGTACTCTCTG |
| | | TCCTCTGTCGTGACCGTGCCTTCCAGCTCTCTGGGAACCCAGACCTACATC |
| | | TGCAATGTGAACCACAAGCCTTCCAACACCAAGGTGGACAAGAGAGTGGAA |
| | | CCCAAGTCCTGCGATAAGACCCACACCTGTCCTCCCTGCCCTGCCCCTGAA |
| | | CTGCTGGGCGGACCTAGCGTGTTCCTGTTCCCTCCAAAGCCCAAGGACACC |
| | | CTGATGATCAGCCGGACCCCTGAAGTGACCTGCGTGGTGGTGGATGTGTCC |
| | | CACGAGGATCCCGAAGTGAAGTTCAATTGGTACGTGGACGGCGTGGAAGTG |
| | | CACAACGCCAAGACCAAGCCCAGAGAGGAACAGTACAACAGCACCTACCGG |
| | | GTGGTGTCCGTGCTGACCGTGCTGCACCAGGACTGGCTGAACGGCAAAGAG |
| | | TACAAGTGCAAGGTGTCCAACAAGGCCCTGCCAGCCCCTATCGAGAAAACC |
| | | ATCAGCAAGGCCAAGGGCCAGCCTAGAGAGCCTCAGGTCTGCACCCTGCCT |
| | | CCCAGCCGGGAAGAGATGACCAAGAACCAGGTGTCCCTGAGCTGCGCCGTG |
| | | AAGGGCTTCTACCCCTCCGATATCGCCGTGGAATGGGAGAGCAACGGCCAG |
| | | CCCGAGAACAACTACAAGACCACCCCTCCCGTGCTGGACAGCGACGGCAGC |
| | | TTCTTCCTGGTGTCCAAACTGACCGTGGACAAGAGCCGGTGGCAGCAGGGC |
| | | AATGTGTTCAGCTGTAGCGTGATGCACGAGGCCCTGCACAACCACTACACC |
| | | CAGAAGTCTCTGAGCCTGAGCCCTGGCAAA |
| SEQ ID | aCSF1R | ATGGAAACCGACACACTGCTGCTGTGGGTGCTGCTCTTGTGGGTGCCAGGA |
| NO: | BI117 | TCTACAGGAGAAGTGCAACTTGTCGAAAGTGGTGGGGGCCTGGTGCAGCCT |
| 289 | A11-R3B | GGGGGCTCCCTGCGGCTGTCCTGCGCCGCCTCCGGATTCACTTTCTCCAAC |
| | VH-hCH1- | GACGAGATGAACTGGATTAGACAGGCTCCTGGAAAGGGTCTCGAATGGGTG |
| | hFc_Hole | TCCTACATTAGCTCATCTTCCAGCACCATCTACTACGCCGACGCAGTGACC |
| | | GGAAGGTTCACCATCTCGAGGGACAACGCCCGCAACTCCCTCTACCTGCAG |
| | | ATGAACTCGCTGCGCGCGGAGGACACCGCTGTGTACTACTGCGCCCGCGGC |
| | | GTGGACGGAGACTTCTCCTTCGACTACTGGGGACAGGGAACTCTTGTGACC |
| | | GTGAGCAGCGCTTCTACCAAGGGACCCAGCGTGTTCCCTCTGGCTCCTTCC |
| | | AGCAAGTCTACCTCTGGCGGAACAGCTGCTCTGGGCTGCCTGGTCAAGGAC |
| | | TACTTTCCTGAGCCTGTGACCGTGTCTTGGAACTCTGGCGCTCTGACATCC |
| | | GGCGTGCACACATTTCCAGCTGTGCTGCAGTCCTCCGGCCTGTACTCTCTG |
| | | TCCTCTGTCGTGACCGTGCCTTCCAGCTCTCTGGGAACCCAGACCTACATC |
| | | TGCAATGTGAACCACAAGCCTTCCAACACCAAGGTGGACAAGAGAGTGGAA |
| | | CCCAAGTCCTGCGATAAGACCCACACCTGTCCTCCCTGCCCTGCCCCTGAA |
| | | CTGCTGGGCGGACCTAGCGTGTTCCTGTTCCCTCCAAAGCCCAAGGACACC |
| | | CTGATGATCAGCCGGACCCCTGAAGTGACCTGCGTGGTGGTGGATGTGTCC |
| | | CACGAGGATCCCGAAGTGAAGTTCAATTGGTACGTGGACGGCGTGGAAGTG |
| | | CACAACGCCAAGACCAAGCCCAGAGAGGAACAGTACAACAGCACCTACCGG |
| | | GTGGTGTCCGTGCTGACCGTGCTGCACCAGGACTGGCTGAACGGCAAAGAG |
| | | TACAAGTGCAAGGTGTCCAACAAGGCCCTGCCAGCCCCTATCGAGAAAACC |
| | | ATCAGCAAGGCCAAGGGCCAGCCTAGAGAGCCTCAGGTCTGCACCCTGCCT |
| | | CCCAGCCGGGAAGAGATGACCAAGAACCAGGTGTCCCTGAGCTGCGCCGTG |
| | | AAGGGCTTCTACCCCTCCGATATCGCCGTGGAATGGGAGAGCAACGGCCAG |
| | | CCCGAGAACAACTACAAGACCACCCCTCCCGTGCTGGACAGCGACGGCAGC |
| | | TTCTTCCTGGTGTCCAAACTGACCGTGGACAAGAGCCGGTGGCAGCAGGGC |
| | | AATGTGTTCAGCTGTAGCGTGATGCACGAGGCCCTGCACAACCACTACACC |
| | | CAGAAGTCTCTGAGCCTGAGCCCTGGCAAA |
| SEQ ID | aCSF1R | ATGGAAACCGACACACTGCTGCTGTGGGTGCTGCTCTTGTGGGTGCCAGGA |
| NO: | BI117 B2- | TCTACAGGAGAAGTGCAACTGGTGGAATCGGGAGGCGGCCTGGTGCAACCT |
| 290 | R3B VH- | GGCGGTAGCCTGCGGCTGAGCTGCGCCGCCTCAGGCTTCACCTTTTCCAAC |
| | hCH1- | GACGAAATGAACTGGATCAGACAGGCGCCTGGCAAAGGACTGGAGTGGGTG |
| | hFc_Hole | TCCTACATCTCGTCCAGGTCAAGCACCATTTATTACGCGGACGCCGTGAAA |
| | | GGGAGATTCACCATCAGCAGAGACAACGCCCGGAACTCCCTCTACCTGCAG |
| | | ATGAACTCCCTGAGGGCCGAGGACACCGCAGTGTACTACTGTGCCAGAAAC |
| | | TCCGACTCCGATGGAAGCTTCGACATCTGGGGACAGGGGACCCTGGTGACT |
| | | GTGTCGTCCGCTTCTACCAAGGGACCCAGCGTGTTCCCTCTGGCTCCTTCC |
| | | AGCAAGTCTACCTCTGGCGGAACAGCTGCTCTGGGCTGCCTGGTCAAGGAC |
| | | TACTTTCCTGAGCCTGTGACCGTGTCTTGGAACTCTGGCGCTCTGACATCC |
| | | GGCGTGCACACATTTCCAGCTGTGCTGCAGTCCTCCGGCCTGTACTCTCTG |
| | | TCCTCTGTCGTGACCGTGCCTTCCAGCTCTCTGGGAACCCAGACCTACATC |
| | | TGCAATGTGAACCACAAGCCTTCCAACACCAAGGTGGACAAGAGAGTGGAA |
| | | CCCAAGTCCTGCGATAAGACCCACACCTGTCCTCCCTGCCCTGCCCCTGAA |
| | | CTGCTGGGCGGACCTAGCGTGTTCCTGTTCCCTCCAAAGCCCAAGGACACC |
| | | CTGATGATCAGCCGGACCCCTGAAGTGACCTGCGTGGTGGTGGATGTGTCC |
| | | CACGAGGATCCCGAAGTGAAGTTCAATTGGTACGTGGACGGCGTGGAAGTG |
| | | CACAACGCCAAGACCAAGCCCAGAGAGGAACAGTACAACAGCACCTACCGG |
| | | GTGGTGTCCGTGCTGACCGTGCTGCACCAGGACTGGCTGAACGGCAAAGAG |
| | | TACAAGTGCAAGGTGTCCAACAAGGCCCTGCCAGCCCCTATCGAGAAAACC |
| | | ATCAGCAAGGCCAAGGGCCAGCCTAGAGAGCCTCAGGTCTGCACCCTGCCT |
| | | CCCAGCCGGGAAGAGATGACCAAGAACCAGGTGTCCCTGAGCTGCGCCGTG |
| | | AAGGGCTTCTACCCCTCCGATATCGCCGTGGAATGGGAGAGCAACGGCCAG |
| | | CCCGAGAACAACTACAAGACCACCCCTCCCGTGCTGGACAGCGACGGCAGC |
| | | TTCTTCCTGGTGTCCAAACTGACCGTGGACAAGAGCCGGTGGCAGCAGGGC |
| | | AATGTGTTCAGCTGTAGCGTGATGCACGAGGCCCTGCACAACCACTACACC |
| | | CAGAAGTCTCTGAGCCTGAGCCCTGGCAAA |
| SEQ ID | aCSF1R | ATGGAAACCGACACACTGCTGCTGTGGGTGCTGCTCTTGTGGGTGCCAGGA |
| NO: | BI117 C5- | TCTACAGGAGAAGTGCAGCTGGTCGAATCGGGGGGAGGACTGGTCCAGCCT |
| 291 | R3B VH- | GGAGGGTCCCTCCGCCTGAGCTGCGCCGCCTCCGGATTCACCTTTTCCAAC |
| | hCH1- | GACGAGATGAACTGGATCAGGCAGGCCCCGGGCAAGGGGCTGGAATGGGTG |
| | hFc_Hole | TCATACATCTCCAGCCGCTCATCGACAATTTACTACGCCGATGCCGTGAAG |
| | | GGTAGATTTACCATCTCCCGGGACAATGCCCGAAACAGCCTGTATCTGCAA |
| | | ATGAACTCCCTGCGGGCGGAGGATACCGCTGTCTACTACTGTGCCAGAGGC |
| | | GTGGATGGGGACTTCAGCTTTGACTTTTGGGGACAGGGCACCCTCGTCACC |
| | | GTGAGCAGCGCTTCTACCAAGGGACCCAGCGTGTTCCCTCTGGCTCCTTCC |
| | | AGCAAGTCTACCTCTGGCGGAACAGCTGCTCTGGGCTGCCTGGTCAAGGAC |
| | | TACTTTCCTGAGCCTGTGACCGTGTCTTGGAACTCTGGCGCTCTGACATCC |
| | | GGCGTGCACACATTTCCAGCTGTGCTGCAGTCCTCCGGCCTGTACTCTCTG |
| | | TCCTCTGTCGTGACCGTGCCTTCCAGCTCTCTGGGAACCCAGACCTACATC |
| | | TGCAATGTGAACCACAAGCCTTCCAACACCAAGGTGGACAAGAGAGTGGAA |
| | | CCCAAGTCCTGCGATAAGACCCACACCTGTCCTCCCTGCCCTGCCCCTGAA |
| | | CTGCTGGGCGGACCTAGCGTGTTCCTGTTCCCTCCAAAGCCCAAGGACACC |
| | | CTGATGATCAGCCGGACCCCTGAAGTGACCTGCGTGGTGGTGGATGTGTCC |
| | | CACGAGGATCCCGAAGTGAAGTTCAATTGGTACGTGGACGGCGTGGAAGTG |
| | | CACAACGCCAAGACCAAGCCCAGAGAGGAACAGTACAACAGCACCTACCGG |
| | | GTGGTGTCCGTGCTGACCGTGCTGCACCAGGACTGGCTGAACGGCAAAGAG |
| | | TACAAGTGCAAGGTGTCCAACAAGGCCCTGCCAGCCCCTATCGAGAAAACC |
| | | ATCAGCAAGGCCAAGGGCCAGCCTAGAGAGCCTCAGGTCTGCACCCTGCCT |
| | | CCCAGCCGGGAAGAGATGACCAAGAACCAGGTGTCCCTGAGCTGCGCCGTG |
| | | AAGGGCTTCTACCCCTCCGATATCGCCGTGGAATGGGAGAGCAACGGCCAG |
| | | CCCGAGAACAACTACAAGACCACCCCTCCCGTGCTGGACAGCGACGGCAGC |
| | | TTCTTCCTGGTGTCCAAACTGACCGTGGACAAGAGCCGGTGGCAGCAGGGC |
| | | AATGTGTTCAGCTGTAGCGTGATGCACGAGGCCCTGCACAACCACTACACC |
| | | CAGAAGTCTCTGAGCCTGAGCCCTGGCAAA |
| SEQ ID | aCSF1R | ATGGAAACCGACACACTGCTGCTGTGGGTGCTGCTCTTGTGGGTGCCAGGA |
| NO: | BI117 C6- | TCTACAGGAGAGGTGCAGCTGGTGGAGTCCGGAGGCGGCCTTGTCCAGCCG |
| 292 | R3B VH- | GGCGGGTCTCTGCGGCTGTCATGTGCGGCCTCGGGATTCACTTTTTCCAAC |
| | hCH1- | GACGAAATGAACTGGATCCGCCAGGCCCCTGGGAAGGGGCTTGAATGGGTG |
| | hFc_Hole | AGCTACATCTCCTCACGGTCCTCCACTATCTATTACGCCGACGCTGTGAAG |
| | | GGCCGCTTCACTATCTCACGCGACAATGCCAGGAACTCTCTCTACCTGCAG |
| | | ATGAACTCCCTGCGGGCCGAAGATACCGCGGTGTACTACTGTGCCCGCTCG |
| | | GGCCGGCTGGACGGGTCATTCGACTACTGGGGACAAGGGACCCTGGTCACC |
| | | GTCTCCTCTGCTTCTACCAAGGGACCCAGCGTGTTCCCTCTGGCTCCTTCC |
| | | AGCAAGTCTACCTCTGGCGGAACAGCTGCTCTGGGCTGCCTGGTCAAGGAC |
| | | TACTTTCCTGAGCCTGTGACCGTGTCTTGGAACTCTGGCGCTCTGACATCC |
| | | GGCGTGCACACATTTCCAGCTGTGCTGCAGTCCTCCGGCCTGTACTCTCTG |
| | | TCCTCTGTCGTGACCGTGCCTTCCAGCTCTCTGGGAACCCAGACCTACATC |
| | | TGCAATGTGAACCACAAGCCTTCCAACACCAAGGTGGACAAGAGAGTGGAA |
| | | CCCAAGTCCTGCGATAAGACCCACACCTGTCCTCCCTGCCCTGCCCCTGAA |
| | | CTGCTGGGCGGACCTAGCGTGTTCCTGTTCCCTCCAAAGCCCAAGGACACC |
| | | CTGATGATCAGCCGGACCCCTGAAGTGACCTGCGTGGTGGTGGATGTGTCC |
| | | CACGAGGATCCCGAAGTGAAGTTCAATTGGTACGTGGACGGCGTGGAAGTG |
| | | CACAACGCCAAGACCAAGCCCAGAGAGGAACAGTACAACAGCACCTACCGG |
| | | GTGGTGTCCGTGCTGACCGTGCTGCACCAGGACTGGCTGAACGGCAAAGAG |
| | | TACAAGTGCAAGGTGTCCAACAAGGCCCTGCCAGCCCCTATCGAGAAAACC |
| | | ATCAGCAAGGCCAAGGGCCAGCCTAGAGAGCCTCAGGTCTGCACCCTGCCT |
| | | CCCAGCCGGGAAGAGATGACCAAGAACCAGGTGTCCCTGAGCTGCGCCGTG |
| | | AAGGGCTTCTACCCCTCCGATATCGCCGTGGAATGGGAGAGCAACGGCCAG |
| | | CCCGAGAACAACTACAAGACCACCCCTCCCGTGCTGGACAGCGACGGCAGC |
| | | TTCTTCCTGGTGTCCAAACTGACCGTGGACAAGAGCCGGTGGCAGCAGGGC |
| | | AATGTGTTCAGCTGTAGCGTGATGCACGAGGCCCTGCACAACCACTACACC |
| | | CAGAAGTCTCTGAGCCTGAGCCCTGGCAAA |
| SEQ ID | aCSF1R | ATGGAAACCGACACACTGCTGCTGTGGGTGCTGCTCTTGTGGGTGCCAGGA |
| NO: | BI117 | TCTACAGGAGAAGTCCAGCTGGTCGAGTCCGGCGGTGGGCTGGTCCAGCCC |
| 293 | D11-R3B | GGCGGATCGCTGCGCCTGTCCTGTGCCGCCTCCGGCTTCACCTTCTCCAAC |
| | VH-hCH1- | GACGAGATGAACTGGATCAGACAGGCCCCCGGTAAGGGACTGGAGTGGGTG |
| | hFc_Hole | AGCTACATCTCCTCGCGCAGCTCCACCATCTACTACGCCGACGCCGTGAAG |
| | | GGAAGGTTCACCATCAGCAGAGATAACGCGCGGAACAGCCTGTACCTGCAG |
| | | ATGAACTCACTGCGGGCTGAAGACACAGCCGTCTATTACTGTGCCAGAGGA |
| | | GTGGAATCCGATTTCAGCTTCGACTACTGGGGACAAGGAACTCTGGTCACG |
| | | GTCAGCTCCGCTTCTACCAAGGGACCCAGCGTGTTCCCTCTGGCTCCTTCC |
| | | AGCAAGTCTACCTCTGGCGGAACAGCTGCTCTGGGCTGCCTGGTCAAGGAC |
| | | TACTTTCCTGAGCCTGTGACCGTGTCTTGGAACTCTGGCGCTCTGACATCC |
| | | GGCGTGCACACATTTCCAGCTGTGCTGCAGTCCTCCGGCCTGTACTCTCTG |
| | | TCCTCTGTCGTGACCGTGCCTTCCAGCTCTCTGGGAACCCAGACCTACATC |
| | | TGCAATGTGAACCACAAGCCTTCCAACACCAAGGTGGACAAGAGAGTGGAA |
| | | CCCAAGTCCTGCGATAAGACCCACACCTGTCCTCCCTGCCCTGCCCCTGAA |
| | | CTGCTGGGCGGACCTAGCGTGTTCCTGTTCCCTCCAAAGCCCAAGGACACC |
| | | CTGATGATCAGCCGGACCCCTGAAGTGACCTGCGTGGTGGTGGATGTGTCC |
| | | CACGAGGATCCCGAAGTGAAGTTCAATTGGTACGTGGACGGCGTGGAAGTG |
| | | CACAACGCCAAGACCAAGCCCAGAGAGGAACAGTACAACAGCACCTACCGG |
| | | GTGGTGTCCGTGCTGACCGTGCTGCACCAGGACTGGCTGAACGGCAAAGAG |
| | | TACAAGTGCAAGGTGTCCAACAAGGCCCTGCCAGCCCCTATCGAGAAAACC |
| | | ATCAGCAAGGCCAAGGGCCAGCCTAGAGAGCCTCAGGTCTGCACCCTGCCT |
| | | CCCAGCCGGGAAGAGATGACCAAGAACCAGGTGTCCCTGAGCTGCGCCGTG |
| | | AAGGGCTTCTACCCCTCCGATATCGCCGTGGAATGGGAGAGCAACGGCCAG |
| | | CCCGAGAACAACTACAAGACCACCCCTCCCGTGCTGGACAGCGACGGCAGC |
| | | TTCTTCCTGGTGTCCAAACTGACCGTGGACAAGAGCCGGTGGCAGCAGGGC |
| | | AATGTGTTCAGCTGTAGCGTGATGCACGAGGCCCTGCACAACCACTACACC |
| | | CAGAAGTCTCTGAGCCTGAGCCCTGGCAAA |
| SEQ ID | aCSF1R | ATGGAAACCGACACACTGCTGCTGTGGGTGCTGCTCTTGTGGGTGCCAGGA |
| NO: | BI123 VH- | TCTACAGGACAGGTGCAGCTTGTGCAAAGCGGGGGAGGCGTGGTGCAGCCG |
| 294 | hCH1- | GGACGGAGCCTGCGGCTGTCGTGCGCCGCGAGCGGTTTCACCTTCTCCTCC |
| | hFc_Hole | TACGCTATGCACTGGGTCCGCCAGGCGCCGGGCAAGGGCCTCGAATGGGTG |
| | | GCCGTGATCAGCTACGATGGCTCCAACAAGTACTACGCCGACTCAGTGAAG |
| | | GGAAGGTTCACCATCTCAAGAGATAACAGCAAGAACACGCTGTACCTCCAG |
| | | ATGAACTCCCTCCGGGCCGAAGACACAGCCGTCTACTACTGTGCGAGAGAG |
| | | CTCGATTACGGCGATTACGGCCTGGACGTGTGGGGCAAGGGAACCACGGTG |
| | | ACCGTCTCCTCCGCTTCTACCAAGGGACCCAGCGTGTTCCCTCTGGCTCCT |
| | | TCCAGCAAGTCTACCTCTGGCGGAACAGCTGCTCTGGGCTGCCTGGTCAAG |
| | | GACTACTTTCCTGAGCCTGTGACCGTGTCTTGGAACTCTGGCGCTCTGACA |
| | | TCCGGCGTGCACACATTTCCAGCTGTGCTGCAGTCCTCCGGCCTGTACTCT |
| | | CTGTCCTCTGTCGTGACCGTGCCTTCCAGCTCTCTGGGAACCCAGACCTAC |
| | | ATCTGCAATGTGAACCACAAGCCTTCCAACACCAAGGTGGACAAGAGAGTG |
| | | GAACCCAAGTCCTGCGATAAGACCCACACCTGTCCTCCCTGCCCTGCCCCT |
| | | GAACTGCTGGGCGGACCTAGCGTGTTCCTGTTCCCTCCAAAGCCCAAGGAC |
| | | ACCCTGATGATCAGCCGGACCCCTGAAGTGACCTGCGTGGTGGTGGATGTG |
| | | TCCCACGAGGATCCCGAAGTGAAGTTCAATTGGTACGTGGACGGCGTGGAA |
| | | GTGCACAACGCCAAGACCAAGCCCAGAGAGGAACAGTACAACAGCACCTAC |
| | | CGGGTGGTGTCCGTGCTGACCGTGCTGCACCAGGACTGGCTGAACGGCAAA |
| | | GAGTACAAGTGCAAGGTGTCCAACAAGGCCCTGCCAGCCCCTATCGAGAAA |
| | | ACCATCAGCAAGGCCAAGGGCCAGCCTAGAGAGCCTCAGGTCTGCACCCTG |
| | | CCTCCCAGCCGGGAAGAGATGACCAAGAACCAGGTGTCCCTGAGCTGCGCC |
| | | GTGAAGGGCTTCTACCCCTCCGATATCGCCGTGGAATGGGAGAGCAACGGC |
| | | CAGCCCGAGAACAACTACAAGACCACCCCTCCCGTGCTGGACAGCGACGGC |
| | | AGCTTCTTCCTGGTGTCCAAACTGACCGTGGACAAGAGCCGGTGGCAGCAG |
| | | GGCAATGTGTTCAGCTGTAGCGTGATGCACGAGGCCCTGCACAACCACTAC |
| | | ACCCAGAAGTCTCTGAGCCTGAGCCCTGGCAAA |
| SEQ ID | aCSF1R | ATGGAAACCGACACACTGCTGCTGTGGGTGCTGCTCTTGTGGGTGCCAGGA |
| NO: | BI123 A5- | TCTACAGGACAAGTGCAGCTCGTGCAGTCAGGCGGTGGCGTGGTGCAGCCC |
| 295 | R3B VH- | GGCCGGTCTCTGAGGCTCAGCTGCGCCGCCTCGGGCTTCACCTTCTCGTCA |
| | hCH1- | TACGCCATGCACTGGGTGCGCCAGGCCCCCGGGAAGGGACTGGAATGGGTC |
| | hFc_Hole | GCCGTGATCTCCTACGATGGATCGAACAAGTACTACGCCGACTCCGTGAAG |
| | | GGGCGGTTCACCATCTCCCGCGACAACTCCAAGAACACCCTTTATCTGCAA |
| | | ATGAACTCGCTCAGAGCAGAGGACACCGCTGTGTACTACTGCGCCAGAGAG |
| | | CTGGACTACGGTGATTGGGGACTGGACGTGTGGGGCAAGGGTACCACCGTG |
| | | ACTGTGTCGTCCGCTTCTACCAAGGGACCCAGCGTGTTCCCTCTGGCTCCT |
| | | TCCAGCAAGTCTACCTCTGGCGGAACAGCTGCTCTGGGCTGCCTGGTCAAG |
| | | GACTACTTTCCTGAGCCTGTGACCGTGTCTTGGAACTCTGGCGCTCTGACA |
| | | TCCGGCGTGCACACATTTCCAGCTGTGCTGCAGTCCTCCGGCCTGTACTCT |
| | | CTGTCCTCTGTCGTGACCGTGCCTTCCAGCTCTCTGGGAACCCAGACCTAC |
| | | ATCTGCAATGTGAACCACAAGCCTTCCAACACCAAGGTGGACAAGAGAGTG |
| | | GAACCCAAGTCCTGCGATAAGACCCACACCTGTCCTCCCTGCCCTGCCCCT |
| | | GAACTGCTGGGCGGACCTAGCGTGTTCCTGTTCCCTCCAAAGCCCAAGGAC |
| | | ACCCTGATGATCAGCCGGACCCCTGAAGTGACCTGCGTGGTGGTGGATGTG |
| | | TCCCACGAGGATCCCGAAGTGAAGTTCAATTGGTACGTGGACGGCGTGGAA |
| | | GTGCACAACGCCAAGACCAAGCCCAGAGAGGAACAGTACAACAGCACCTAC |
| | | CGGGTGGTGTCCGTGCTGACCGTGCTGCACCAGGACTGGCTGAACGGCAAA |
| | | GAGTACAAGTGCAAGGTGTCCAACAAGGCCCTGCCAGCCCCTATCGAGAAA |
| | | ACCATCAGCAAGGCCAAGGGCCAGCCTAGAGAGCCTCAGGTCTGCACCCTG |
| | | CCTCCCAGCCGGGAAGAGATGACCAAGAACCAGGTGTCCCTGAGCTGCGCC |
| | | GTGAAGGGCTTCTACCCCTCCGATATCGCCGTGGAATGGGAGAGCAACGGC |
| | | CAGCCCGAGAACAACTACAAGACCACCCCTCCCGTGCTGGACAGCGACGGC |
| | | AGCTTCTTCCTGGTGTCCAAACTGACCGTGGACAAGAGCCGGTGGCAGCAG |
| | | GGCAATGTGTTCAGCTGTAGCGTGATGCACGAGGCCCTGCACAACCACTAC |
| | | ACCCAGAAGTCTCTGAGCCTGAGCCCTGGCAAA |
| SEQ ID | aCSF1R | ATGGAAACCGACACACTGCTGCTGTGGGTGCTGCTCTTGTGGGTGCCAGGA |
| NO: | BI123 B6- | TCTACAGGACAAGTGCAACTGGTGCAATCCGGAGGGGGTGTGGTCCAACCG |
| 296 | R3B VH- | GGACGCAGCCTGCGGCTGTCCTGCGCCGCCAGCGGCTTCACATTCTCCTCC |
| | hCH1- | TACGCCATGCACTGGGTCCGCCAGGCGCCAGGTAAGGGACTCGAATGGGTG |
| | hFc_Hole | GCAGTGATCCCTTACTACGGATCAAACAAGTATTACGCCGATTCCGTGAAG |
| | | GGCCGCTTCACCATCAGCAGAGACAACTCCAAGAACACCCTCTACCTGCAG |
| | | ATGAACTCCCTTCGCGCCGAGGATACCGCCGTCTACTACTGCGCCCGCGAG |
| | | CTGGACTACGGTGACTACGGACTCGATGTGTGGGGAAAGGGTACCACTGTG |
| | | ACCGTGAGCTCCGCTTCTACCAAGGGACCCAGCGTGTTCCCTCTGGCTCCT |
| | | TCCAGCAAGTCTACCTCTGGCGGAACAGCTGCTCTGGGCTGCCTGGTCAAG |
| | | GACTACTTTCCTGAGCCTGTGACCGTGTCTTGGAACTCTGGCGCTCTGACA |
| | | TCCGGCGTGCACACATTTCCAGCTGTGCTGCAGTCCTCCGGCCTGTACTCT |
| | | CTGTCCTCTGTCGTGACCGTGCCTTCCAGCTCTCTGGGAACCCAGACCTAC |
| | | ATCTGCAATGTGAACCACAAGCCTTCCAACACCAAGGTGGACAAGAGAGTG |
| | | GAACCCAAGTCCTGCGATAAGACCCACACCTGTCCTCCCTGCCCTGCCCCT |
| | | GAACTGCTGGGCGGACCTAGCGTGTTCCTGTTCCCTCCAAAGCCCAAGGAC |
| | | ACCCTGATGATCAGCCGGACCCCTGAAGTGACCTGCGTGGTGGTGGATGTG |
| | | TCCCACGAGGATCCCGAAGTGAAGTTCAATTGGTACGTGGACGGCGTGGAA |
| | | GTGCACAACGCCAAGACCAAGCCCAGAGAGGAACAGTACAACAGCACCTAC |
| | | CGGGTGGTGTCCGTGCTGACCGTGCTGCACCAGGACTGGCTGAACGGCAAA |
| | | GAGTACAAGTGCAAGGTGTCCAACAAGGCCCTGCCAGCCCCTATCGAGAAA |
| | | ACCATCAGCAAGGCCAAGGGCCAGCCTAGAGAGCCTCAGGTCTGCACCCTG |
| | | CCTCCCAGCCGGGAAGAGATGACCAAGAACCAGGTGTCCCTGAGCTGCGCC |
| | | GTGAAGGGCTTCTACCCCTCCGATATCGCCGTGGAATGGGAGAGCAACGGC |
| | | CAGCCCGAGAACAACTACAAGACCACCCCTCCCGTGCTGGACAGCGACGGC |
| | | AGCTTCTTCCTGGTGTCCAAACTGACCGTGGACAAGAGCCGGTGGCAGCAG |
| | | GGCAATGTGTTCAGCTGTAGCGTGATGCACGAGGCCCTGCACAACCACTAC |
| | | ACCCAGAAGTCTCTGAGCCTGAGCCCTGGCAAA |
| SEQ ID | aCSF1R | ATGGAAACCGACACACTGCTGCTGTGGGTGCTGCTCTTGTGGGTGCCAGGA |
| NO: | BI123 C1- | TCTACAGGACAGGTGCAACTGGTCCAGTCGGGCGGAGGAGTGGTCCAGCCG |
| 297 | R3B VH- | GGTAGGTCACTGCGGCTGTCATGTGCCGCTAGCGGATTCACTTTCTCTTCC |
| | hCH1- | TACGCAATGCACTGGGTGAGACAAGCCCCTGGCAAGGGACTGGAGTGGGTC |
| | hFc_Hole | GCCGTGATCTCGTATGACGGGTCCGATAAGTACTACGCTGATTCCGTGAAG |
| | | GGACGCTTCACGATCAGCCGCGACAACTCCAAAAACACTCTCTACCTGCAA |
| | | ATGAATTCCCTTCGCGCCGAAGATACTGCAGTGTACTACTGCGCCAGAGAG |
| | | CTGGACTACGGAGACTACGGCCTGGACGTGTGGGGCAAGGGCACCACTGTG |
| | | ACCGTCTCCTCCGCTTCTACCAAGGGACCCAGCGTGTTCCCTCTGGCTCCT |
| | | TCCAGCAAGTCTACCTCTGGCGGAACAGCTGCTCTGGGCTGCCTGGTCAAG |
| | | GACTACTTTCCTGAGCCTGTGACCGTGTCTTGGAACTCTGGCGCTCTGACA |
| | | TCCGGCGTGCACACATTTCCAGCTGTGCTGCAGTCCTCCGGCCTGTACTCT |
| | | CTGTCCTCTGTCGTGACCGTGCCTTCCAGCTCTCTGGGAACCCAGACCTAC |
| | | ATCTGCAATGTGAACCACAAGCCTTCCAACACCAAGGTGGACAAGAGAGTG |
| | | GAACCCAAGTCCTGCGATAAGACCCACACCTGTCCTCCCTGCCCTGCCCCT |
| | | GAACTGCTGGGCGGACCTAGCGTGTTCCTGTTCCCTCCAAAGCCCAAGGAC |
| | | ACCCTGATGATCAGCCGGACCCCTGAAGTGACCTGCGTGGTGGTGGATGTG |
| | | TCCCACGAGGATCCCGAAGTGAAGTTCAATTGGTACGTGGACGGCGTGGAA |
| | | GTGCACAACGCCAAGACCAAGCCCAGAGAGGAACAGTACAACAGCACCTAC |
| | | CGGGTGGTGTCCGTGCTGACCGTGCTGCACCAGGACTGGCTGAACGGCAAA |
| | | GAGTACAAGTGCAAGGTGTCCAACAAGGCCCTGCCAGCCCCTATCGAGAAA |
| | | ACCATCAGCAAGGCCAAGGGCCAGCCTAGAGAGCCTCAGGTCTGCACCCTG |
| | | CCTCCCAGCCGGGAAGAGATGACCAAGAACCAGGTGTCCCTGAGCTGCGCC |
| | | GTGAAGGGCTTCTACCCCTCCGATATCGCCGTGGAATGGGAGAGCAACGGC |
| | | CAGCCCGAGAACAACTACAAGACCACCCCTCCCGTGCTGGACAGCGACGGC |
| | | AGCTTCTTCCTGGTGTCCAAACTGACCGTGGACAAGAGCCGGTGGCAGCAG |
| | | GGCAATGTGTTCAGCTGTAGCGTGATGCACGAGGCCCTGCACAACCACTAC |
| | | ACCCAGAAGTCTCTGAGCCTGAGCCCTGGCAAA |
| SEQ ID | aCSF1R | ATGGAAACCGACACACTGCTGCTGTGGGTGCTGCTCTTGTGGGTGCCAGGA |
| NO: | BI117 VL- | TCTACAGGACAACTGGTGCTGACCCAGCCCCCTTCCGTCTCCGGCGCCCCG |
| 298 | hCLIg_v1 | GGCCAGCGCGTCACTATCTCCTGTACCGGCAGCTCCAGCAACATCGGAGCA |
| | | GGATACGACGTGCACTGGTACCAACAGCTCCCCGGAACCGCGCCTAAGCTG |
| | | CTGATCTACGGGAACTCTAACCGGCCGTCCGGCGTGCCTGACCGCTTCAGC |
| | | GGATCGAAGTCCGGCACCAGCGCCTCCCTGGCCATCACTGGACTGCAGGCC |
| | | GAGGACGAAGCCGATTACTACTGCCAGTCCTACGACTCCTCCCTGTCCGAG |
| | | GAAGTGTTCGGAGGCGGGACGAAGCTCACCGTCCTGGGACAACCTAAGGCC |
| | | AATCCTACCGTGACACTGTTCCCTCCATCCTCCGAGGAACTGCAGGCCAAC |
| | | AAGGCTACCCTCGTGTGCCTGATCTCCGACTTTTACCCTGGCGCTGTGACC |
| | | GTGGCCTGGAAGGCTGATGGATCTCCTGTGAAGGCTGGCGTGGAAACCACC |
| | | AAGCCTTCCAAGCAGTCCAACAACAAATACGCCGCCTCCTCCTACCTGTCT |
| | | CTGACCCCTGAACAGTGGAAGTCCCACCGGTCCTACAGCTGCCAAGTGACC |
| | | CATGAGGGCTCCACCGTGGAAAAGACCGTGGCTCCTACCGAGTGCTCC |
| SEQ ID | aCSF1R | ATGGAAACCGACACACTGCTGCTGTGGGTGCTGCTCTTGTGGGTGCCAGGA |
| NO: | BI123 VL- | TCTACAGGATCCCTCGTGCTGACCCAACCTCCTTCAGTCTCCGTGGCCCCC |
| 299 | hCLIg_v1 | GGCAAGACCGCCCGCATCACCTGTGGCGGTAACAACATCGGCTCCAAGTCA |
| | | GTCCACTGGTACCAGCAGAAGCCGGGCCAAGCTCCCGTGCTGGTCGTGTAC |
| | | GACGACTCAGACCGCCCCAGCGGTATCCCTGAGAGATTTAGCGGATCCAAC |
| | | TCCGGGAACACCGCTACCCTGACCATCTCAAGGGTGGAGGCCGGAGACGAA |
| | | GCCGACTACTACTGCCAGGTGTGGGATTCCAGCTCCGACCACGTGGTGTTC |
| | | GGCGGCGGCACTCAGCTCACCGTGCTGGGACAACCTAAGGCCAATCCTACC |
| | | GTGACACTGTTCCCTCCATCCTCCGAGGAACTGCAGGCCAACAAGGCTACC |
| | | CTCGTGTGCCTGATCTCCGACTTTTACCCTGGCGCTGTGACCGTGGCCTGG |
| | | AAGGCTGATGGATCTCCTGTGAAGGCTGGCGTGGAAACCACCAAGCCTTCC |
| | | AAGCAGTCCAACAACAAATACGCCGCCTCCTCCTACCTGTCTCTGACCCCT |
| | | GAACAGTGGAAGTCCCACCGGTCCTACAGCTGCCAAGTGACCCATGAGGGC |
| | | TCCACCGTGGAAAAGACCGTGGCTCCTACCGAGTGCTCC |
| SEQ ID | aCCR2 | ATGGAAACCGACACACTGCTGCTGTGGGTGCTGCTCTTGTGGGTGCCAGGA |
| NO: | Hum1 VH- | TCTACAGGAGAAGTGCAGCTGGTGGAAAGCGGTGGCGGTCTGGTGCAGCCT |
| 300 | hCH1- | GGCGGTTCCCTCCGGCTGTCATGTGCTGCCTCCGGATTCTCGTTCAACGCG |
| | hFc_Knob | TATGCCATGAACTGGGTGAGGCAGGCCCCGGGAAAGGGACTGGAATGGGTG |
| | | GGGAGAATCCGGACCAAGAACAATAACTACGCTACTTACTACGCCGACTCC |
| | | GTCAAGGACCGGTTCACAATTTCCCGGGACGACAGCAAGAGCTCACTGTAC |
| | | CTTCAGATGAACAGCCTCAAAACCGAGGACACCGCCGTGTACTACTGTGCC |
| | | ACCTTTTACGGCAACGGTGTGTGGGGACAGGGAACAACTGTCACCGTGTCC |
| | | TCCGCTTCTACCAAGGGACCCAGCGTGTTCCCTCTGGCTCCTTCCAGCAAG |
| | | TCTACCTCTGGCGGAACAGCTGCTCTGGGCTGCCTGGTCAAGGACTACTTT |
| | | CCTGAGCCTGTGACCGTGTCTTGGAACTCTGGCGCTCTGACATCCGGCGTG |
| | | CACACATTTCCAGCTGTGCTGCAGTCCTCCGGCCTGTACTCTCTGTCCTCT |
| | | GTCGTGACCGTGCCTTCCAGCTCTCTGGGAACCCAGACCTACATCTGCAAT |
| | | GTGAACCACAAGCCTTCCAACACCAAGGTGGACAAGAGAGTGGAACCCAAG |
| | | TCCTGCGATAAGACCCACACATGTCCTCCATGCCCTGCCCCTGAGCTGCTG |
| | | GGCGGACCTTCCGTGTTCCTGTTCCCTCCAAAGCCCAAGGACACCCTGATG |
| | | ATCAGCCGGACCCCTGAAGTGACCTGCGTGGTGGTGGATGTGTCCCACGAG |
| | | GATCCCGAAGTGAAGTTCAATTGGTACGTGGACGGCGTGGAAGTGCACAAC |
| | | GCCAAGACCAAGCCCAGAGAGGAACAGTACAACAGCACCTACCGGGTGGTG |
| | | TCCGTGCTGACCGTGCTGCATCAGGACTGGCTGAACGGCAAAGAGTACAAG |
| | | TGCAAGGTGTCCAACAAGGCCCTGCCTGCCCCTATCGAGAAAACCATCAGC |
| | | AAGGCCAAGGGCCAGCCCCGCGAACCTCAGGTGTACACACTGCCTCCCTGC |
| | | CGGGAAGAGATGACCAAGAACCAGGTGTCCCTGTGGTGCCTGGTCAAGGGC |
| | | TTCTACCCCTCCGATATCGCCGTGGAATGGGAGAGCAACGGCCAGCCCGAG |
| | | AACAACTACAAGACCACCCCTCCCGTGCTGGACAGCGACGGCAGCTTCTTC |
| | | CTGTACTCCAAACTGACCGTGGACAAGAGCCGGTGGCAGCAGGGCAATGTG |
| | | TTCAGCTGTAGCGTGATGCACGAGGCCCTGCACAACCACTACACCCAGAAG |
| | | TCCCTGAGCCTGTCTCCTGGCAAA |
| SEQ ID | aCCR2 | ATGGAAACCGACACACTGCTGCTGTGGGTGCTGCTCTTGTGGGTGCCAGGA |
| NO: | Hum2 VH- | TCTACAGGAGAGGTGCAGCTGGTTGAATCTGGCGGAGGATTGGTTCAGCCT |
| 301 | hCH1- | GGCGGCTCTCTGAGACTGTCTTGTGCCGCCTCTGGCTTCTCCTTCAACGCC |
| | hFc_Knob | TACGCCATGAACTGGGTCCGACAGGCTCCTGGCAAAGGCCTGGAATGGGTC |
| | | GGAAGAATCCGGACCAAGAACAACAACTACGCCACCTACTACGCCGACTCC |
| | | GTGAAGGACCGGTTCACCATCTCTCGGGACGACTCCAAGTCCAGCCTGTAC |
| | | CTGCAGATGAACTCCCTGAAAACCGAGGACACCGCCGTGTACTACTGCGCC |
| | | ACCTTTTACGGCAATGGCGTGTGGGGCCAGGGCACCACAGTTACAGTTTCT |
| | | TCCGCTTCTACCAAGGGACCCAGCGTGTTCCCTCTGGCTCCTTCCAGCAAG |
| | | TCTACCTCTGGCGGAACAGCTGCTCTGGGCTGCCTGGTCAAGGACTACTTT |
| | | CCTGAGCCTGTGACCGTGTCTTGGAACTCTGGCGCTCTGACATCCGGCGTG |
| | | CACACATTTCCAGCTGTGCTGCAGTCCTCCGGCCTGTACTCTCTGTCCTCT |
| | | GTCGTGACCGTGCCTTCCAGCTCTCTGGGAACCCAGACCTACATCTGCAAT |
| | | GTGAACCACAAGCCTTCCAACACCAAGGTGGACAAGAGAGTGGAACCCAAG |
| | | TCCTGCGATAAGACCCACACATGTCCTCCATGCCCTGCCCCTGAGCTGCTG |
| | | GGCGGACCTTCCGTGTTCCTGTTCCCTCCAAAGCCCAAGGACACCCTGATG |
| | | ATCAGCCGGACCCCTGAAGTGACCTGCGTGGTGGTGGATGTGTCCCACGAG |
| | | GATCCCGAAGTGAAGTTCAATTGGTACGTGGACGGCGTGGAAGTGCACAAC |
| | | GCCAAGACCAAGCCCAGAGAGGAACAGTACAACAGCACCTACCGGGTGGTG |
| | | TCCGTGCTGACCGTGCTGCATCAGGACTGGCTGAACGGCAAAGAGTACAAG |
| | | TGCAAGGTGTCCAACAAGGCCCTGCCTGCCCCTATCGAGAAAACCATCAGC |
| | | AAGGCCAAGGGCCAGCCCCGCGAACCTCAGGTGTACACACTGCCTCCCTGC |
| | | CGGGAAGAGATGACCAAGAACCAGGTGTCCCTGTGGTGCCTGGTCAAGGGC |
| | | TTCTACCCCTCCGATATCGCCGTGGAATGGGAGAGCAACGGCCAGCCCGAG |
| | | AACAACTACAAGACCACCCCTCCCGTGCTGGACAGCGACGGCAGCTTCTTC |
| | | CTGTACTCCAAACTGACCGTGGACAAGAGCCGGTGGCAGCAGGGCAATGTG |
| | | TTCAGCTGTAGCGTGATGCACGAGGCCCTGCACAACCACTACACCCAGAAG |
| | | TCCCTGAGCCTGTCTCCTGGCAAA |
| SEQ ID | aCCR2 | ATGGAAACCGACACACTGCTGCTGTGGGTGCTGCTCTTGTGGGTGCCAGGA |
| NO: | VL- | TCTACAGGAGACGTCGTCATGACCCAATCCCCGCTCTCCCTGCCGGTGACT |
| 302 | hCLIg_vk | CTCGGCCAGCCGGCGTCCATCTCGTGCAAGTCCTCCCAATCCCTGCTGGAT |
| | | TCGGATGGGAAGACTTTCCTGAACTGGCTGCAGCAACGGCCCGGCCAGTCG |
| | | CCACGGCGGCTGATCTACCTGGTGTCCAAGCTGGATTCAGGTGTGCCTGAT |
| | | AGATTCTCCGGCAGCGGATCGGGGACCGACTTCACGCTGAAGATCTCCAGA |
| | | GTGGAAGCAGAGGACGTGGGCGTCTATTACTGTTGGCAGGGGACTCATTTC |
| | | CCCTATACCTTTGGAGGTGGTACTAAGGTGGAAATTAAGAGAACAGTGGCC |
| | | GCTCCTTCCGTGTTCATCTTCCCACCCTCCGACGAGCAGCTGAAGTCCGGC |
| | | ACCGCTTCTGTCGTGTGCCTGCTCAACAACTTCTACCCTCGGGAAGCCAAG |
| | | GTGCAGTGGAAGGTGGACAACGCCCTGCAGTCCGGCAACTCCCAGGAATCC |
| | | GTCACCGAGCAGGACTCCAAGGACAGCACCTACTCCCTGTCCTCCACCCTG |
| | | ACCCTGTCCAAGGCCGACTACGAGAAGCACAAGGTGTACGCCTGCGAAGTG |
| | | ACCCACCAGGGCCTGAGCAGCCCCGTGACCAAGTCCTTCAACCGGGGCGAG |
| | | TGC |
| SEQ ID | aCSF1R | ATGGAAACCGACACACTGCTGCTGTGGGTGCTGCTCTTGTGGGTGCCAGGA |
| NO: | BI117 VH- | TCTACAGGAGAAGTGCAGCTGGTCGAAAGCGGAGGGGGTCTGGTCCAGCCT |
| 303 | hCH1- | GGAGGGTCCCTGCGGCTGTCCTGCGCCGCTTCCGGCTTCACCTTCTCCAAC |
| | hFc_Hole- | GATGAAATGAACTGGATCCGCCAAGCCCCTGGAAAGGGCCTGGAATGGGTG |
| | 3 x 4GS- | TCGTACATCTCGAGCAGGTCCAGCACTATCTACTATGCCGACGCGGTGAAG |
| | BH794_VH- | GGACGCTTCACTATCAGCCGCGATAACGCACGCAATTCCCTCTACCTGCAG |
| | 3 x 4GS- | ATGAACTCGCTCAGAGCTGAGGATACTGCCGTCTACTACTGCGCCCGCGGC |
| | BH794_VL | GTGGACGGCGATTTTTCCTTCGATTACTGGGGACAGGGCACTCTTGTCACC |
| | | GTGTCAAGCGCTTCTACCAAGGGACCCAGCGTGTTCCCTCTGGCTCCTTCC |
| | | AGCAAGTCTACCTCTGGCGGAACAGCTGCTCTGGGCTGCCTGGTCAAGGAC |
| | | TACTTTCCTGAGCCTGTGACCGTGTCTTGGAACTCTGGCGCTCTGACATCC |
| | | GGCGTGCACACATTTCCAGCTGTGCTGCAGTCCTCCGGCCTGTACTCTCTG |
| | | TCCTCTGTCGTGACCGTGCCTTCCAGCTCTCTGGGAACCCAGACCTACATC |
| | | TGCAATGTGAACCACAAGCCTTCCAACACCAAGGTGGACAAGAGAGTGGAA |
| | | CCCAAGTCCTGCGATAAGACCCACACCTGTCCTCCCTGCCCTGCCCCTGAA |
| | | CTGCTGGGCGGACCTAGCGTGTTCCTGTTCCCTCCAAAGCCCAAGGACACC |
| | | CTGATGATCAGCCGGACCCCTGAAGTGACCTGCGTGGTGGTGGATGTGTCC |
| | | CACGAGGATCCCGAAGTGAAGTTCAATTGGTACGTGGACGGCGTGGAAGTG |
| | | CACAACGCCAAGACCAAGCCCAGAGAGGAACAGTACAACAGCACCTACCGG |
| | | GTGGTGTCCGTGCTGACCGTGCTGCACCAGGACTGGCTGAACGGCAAAGAG |
| | | TACAAGTGCAAGGTGTCCAACAAGGCCCTGCCAGCCCCTATCGAGAAAACC |
| | | ATCAGCAAGGCCAAGGGCCAGCCTAGAGAGCCTCAGGTCTGCACCCTGCCT |
| | | CCCAGCCGGGAAGAGATGACCAAGAACCAGGTGTCCCTGAGCTGCGCCGTG |
| | | AAGGGCTTCTACCCCTCCGATATCGCCGTGGAATGGGAGAGCAACGGCCAG |
| | | CCCGAGAACAACTACAAGACCACCCCTCCCGTGCTGGACAGCGACGGCAGC |
| | | TTCTTCCTGGTGTCCAAACTGACCGTGGACAAGAGCCGGTGGCAGCAGGGC |
| | | AATGTGTTCAGCTGTAGCGTGATGCACGAGGCCCTGCACAACCACTACACC |
| | | CAGAAGTCTCTGAGCCTGAGCCCTGGCAAAGGTGGCGGAGGAAGCGGAGGC |
| | | GGAGGTTCTGGCGGCGGAGGATCTCAGGTGCAGCTGGTTCAGTCTGGCGCC |
| | | GAAGTGAAGAAACCTGGCTCCTCCGTGAAGGTGTCCTGCAAGGCTTCTGGC |
| | | GGCACCTTCTCCTCTTACGCCATCTCCTGGGTCCGACAGGCTCCTGGACAA |
| | | GGCTTGGAATGGATGGGCGGCATCATCCCCATCTTCGGCACCGCCAATTAC |
| | | GCCCAGAAATTCCAGGGCAGAGTGACCATCACCGCCGACAAGTCTACCTCC |
| | | ACCGCCTACATGGAACTGTCCAGCCTGAGATCTGAGGACACCGCCGTGTAC |
| | | TACTGTGCCAGAGGCGGCTACTCTTACGGCTCCCTGGATTATTGGGGCCAG |
| | | GGCACACTGGTCACCGTGTCCTCTGGTGGCGGAGGAAGCGGAGGCGGAGGT |
| | | TCTGGCGGCGGAGGATCTGACATCCAGATGACCCAGTCTCCATCCTCTCTG |
| | | TCCGCCTCTGTGGGCGACAGAGTGACCATCACCTGTCGGGCCTCTCAGTCC |
| | | ATCATCTCCGACCTGAACTGGTATCAGCAGAAGCCCGGCAAGGCCCCTAAG |
| | | CTGCTGATCCATGCTGCTTCCAGTCTGCAGTCTGGCGTGCCCTCTAGATTC |
| | | TCCGGCTCTGGCTCTGGCACCGACTTTACCCTGACAATCTCCAGCCTGCAG |
| | | CCTGAGGACTTCGCCACCTACTACTGCCAGCAGTCCTACAGCACCCCTTAC |
| | | ACCTTTGGCCAGGGCACCAAGCTGGAAATCAAG |
| SEQ ID | aCSF1R | ATGGAAACCGACACACTGCTGCTGTGGGTGCTGCTCTTGTGGGTGCCAGGA |
| NO: | BI123 VH- | TCTACAGGACAGGTGCAGCTTGTGCAAAGCGGGGGAGGCGTGGTGCAGCCG |
| 304 | hCH1- | GGACGGAGCCTGCGGCTGTCGTGCGCCGCGAGCGGTTTCACCTTCTCCTCC |
| | hFc_Hole- | TACGCTATGCACTGGGTCCGCCAGGCGCCGGGCAAGGGCCTCGAATGGGTG |
| | 3 x 4GS- | GCCGTGATCAGCTACGATGGCTCCAACAAGTACTACGCCGACTCAGTGAAG |
| | BH794_VH- | GGAAGGTTCACCATCTCAAGAGATAACAGCAAGAACACGCTGTACCTCCAG |
| | 3 x 4GS- | ATGAACTCCCTCCGGGCCGAAGACACAGCCGTCTACTACTGTGCGAGAGAG |
| | BH794_VL | CTCGATTACGGCGATTACGGCCTGGACGTGTGGGGCAAGGGAACCACGGTG |
| | | ACCGTCTCCTCCGCTTCTACCAAGGGACCCAGCGTGTTCCCTCTGGCTCCT |
| | | TCCAGCAAGTCTACCTCTGGCGGAACAGCTGCTCTGGGCTGCCTGGTCAAG |
| | | GACTACTTTCCTGAGCCTGTGACCGTGTCTTGGAACTCTGGCGCTCTGACA |
| | | TCCGGCGTGCACACATTTCCAGCTGTGCTGCAGTCCTCCGGCCTGTACTCT |
| | | CTGTCCTCTGTCGTGACCGTGCCTTCCAGCTCTCTGGGAACCCAGACCTAC |
| | | ATCTGCAATGTGAACCACAAGCCTTCCAACACCAAGGTGGACAAGAGAGTG |
| | | GAACCCAAGTCCTGCGATAAGACCCACACCTGTCCTCCCTGCCCTGCCCCT |
| | | GAACTGCTGGGCGGACCTAGCGTGTTCCTGTTCCCTCCAAAGCCCAAGGAC |
| | | ACCCTGATGATCAGCCGGACCCCTGAAGTGACCTGCGTGGTGGTGGATGTG |
| | | TCCCACGAGGATCCCGAAGTGAAGTTCAATTGGTACGTGGACGGCGTGGAA |
| | | GTGCACAACGCCAAGACCAAGCCCAGAGAGGAACAGTACAACAGCACCTAC |
| | | CGGGTGGTGTCCGTGCTGACCGTGCTGCACCAGGACTGGCTGAACGGCAAA |
| | | GAGTACAAGTGCAAGGTGTCCAACAAGGCCCTGCCAGCCCCTATCGAGAAA |
| | | ACCATCAGCAAGGCCAAGGGCCAGCCTAGAGAGCCTCAGGTCTGCACCCTG |
| | | CCTCCCAGCCGGGAAGAGATGACCAAGAACCAGGTGTCCCTGAGCTGCGCC |
| | | GTGAAGGGCTTCTACCCCTCCGATATCGCCGTGGAATGGGAGAGCAACGGC |
| | | CAGCCCGAGAACAACTACAAGACCACCCCTCCCGTGCTGGACAGCGACGGC |
| | | AGCTTCTTCCTGGTGTCCAAACTGACCGTGGACAAGAGCCGGTGGCAGCAG |
| | | GGCAATGTGTTCAGCTGTAGCGTGATGCACGAGGCCCTGCACAACCACTAC |
| | | ACCCAGAAGTCTCTGAGCCTGAGCCCTGGCAAAGGTGGCGGAGGAAGCGGA |
| | | GGCGGAGGTTCTGGCGGCGGAGGATCTCAGGTGCAGCTGGTTCAGTCTGGC |
| | | GCCGAAGTGAAGAAACCTGGCTCCTCCGTGAAGGTGTCCTGCAAGGCTTCT |
| | | GGCGGCACCTTCTCCTCTTACGCCATCTCCTGGGTCCGACAGGCTCCTGGA |
| | | CAAGGCTTGGAATGGATGGGCGGCATCATCCCCATCTTCGGCACCGCCAAT |
| | | TACGCCCAGAAATTCCAGGGCAGAGTGACCATCACCGCCGACAAGTCTACC |
| | | TCCACCGCCTACATGGAACTGTCCAGCCTGAGATCTGAGGACACCGCCGTG |
| | | TACTACTGTGCCAGAGGCGGCTACTCTTACGGCTCCCTGGATTATTGGGGC |
| | | CAGGGCACACTGGTCACCGTGTCCTCTGGTGGCGGAGGAAGCGGAGGCGGA |
| | | GGTTCTGGCGGCGGAGGATCTGACATCCAGATGACCCAGTCTCCATCCTCT |
| | | CTGTCCGCCTCTGTGGGCGACAGAGTGACCATCACCTGTCGGGCCTCTCAG |
| | | TCCATCATCTCCGACCTGAACTGGTATCAGCAGAAGCCCGGCAAGGCCCCT |
| | | AAGCTGCTGATCCATGCTGCTTCCAGTCTGCAGTCTGGCGTGCCCTCTAGA |
| | | TTCTCCGGCTCTGGCTCTGGCACCGACTTTACCCTGACAATCTCCAGCCTG |
| | | CAGCCTGAGGACTTCGCCACCTACTACTGCCAGCAGTCCTACAGCACCCCT |
| | | TACACCTTTGGCCAGGGCACCAAGCTGGAAATCAAG |
| SEQ ID | aCCR2 | ATGGAAACCGACACACTGCTGCTGTGGGTGCTGCTCTTGTGGGTGCCAGGA |
| NO: | Hum1 VH- | TCTACAGGAGAAGTGCAGCTGGTGGAAAGCGGTGGCGGTCTGGTGCAGCCT |
| 305 | hCH1- | GGCGGTTCCCTCCGGCTGTCATGTGCTGCCTCCGGATTCTCGTTCAACGCG |
| | hFc_Knob- | TATGCCATGAACTGGGTGAGGCAGGCCCCGGGAAAGGGACTGGAATGGGTG |
| | 3 x 4GS- | GGGAGAATCCGGACCAAGAACAATAACTACGCTACTTACTACGCCGACTCC |
| | BH794_VH- | GTCAAGGACCGGTTCACAATTTCCCGGGACGACAGCAAGAGCTCACTGTAC |
| | 3 x 4GS- | CTTCAGATGAACAGCCTCAAAACCGAGGACACCGCCGTGTACTACTGTGCC |
| | BH794_VL | ACCTTTTACGGCAACGGTGTGTGGGGACAGGGAACAACTGTCACCGTGTCC |
| | | TCCGCTTCTACCAAGGGACCCAGCGTGTTCCCTCTGGCTCCTTCCAGCAAG |
| | | TCTACCTCTGGCGGAACAGCTGCTCTGGGCTGCCTGGTCAAGGACTACTTT |
| | | CCTGAGCCTGTGACCGTGTCTTGGAACTCTGGCGCTCTGACATCCGGCGTG |
| | | CACACATTTCCAGCTGTGCTGCAGTCCTCCGGCCTGTACTCTCTGTCCTCT |
| | | GTCGTGACCGTGCCTTCCAGCTCTCTGGGAACCCAGACCTACATCTGCAAT |
| | | GTGAACCACAAGCCTTCCAACACCAAGGTGGACAAGAGAGTGGAACCCAAG |
| | | TCCTGCGATAAGACCCACACATGTCCTCCATGCCCTGCCCCTGAGCTGCTG |
| | | GGCGGACCTTCCGTGTTCCTGTTCCCTCCAAAGCCCAAGGACACCCTGATG |
| | | ATCAGCCGGACCCCTGAAGTGACCTGCGTGGTGGTGGATGTGTCCCACGAG |
| | | GATCCCGAAGTGAAGTTCAATTGGTACGTGGACGGCGTGGAAGTGCACAAC |
| | | GCCAAGACCAAGCCCAGAGAGGAACAGTACAACAGCACCTACCGGGTGGTG |
| | | TCCGTGCTGACCGTGCTGCATCAGGACTGGCTGAACGGCAAAGAGTACAAG |
| | | TGCAAGGTGTCCAACAAGGCCCTGCCTGCCCCTATCGAGAAAACCATCAGC |
| | | AAGGCCAAGGGCCAGCCCCGCGAACCTCAGGTGTACACACTGCCTCCCTGC |
| | | CGGGAAGAGATGACCAAGAACCAGGTGTCCCTGTGGTGCCTGGTCAAGGGC |
| | | TTCTACCCCTCCGATATCGCCGTGGAATGGGAGAGCAACGGCCAGCCCGAG |
| | | AACAACTACAAGACCACCCCTCCCGTGCTGGACAGCGACGGCAGCTTCTTC |
| | | CTGTACTCCAAACTGACCGTGGACAAGAGCCGGTGGCAGCAGGGCAATGTG |
| | | TTCAGCTGTAGCGTGATGCACGAGGCCCTGCACAACCACTACACCCAGAAG |
| | | TCCCTGAGCCTGTCTCCTGGCAAAGGTGGCGGAGGAAGCGGAGGCGGAGGT |
| | | TCTGGCGGCGGAGGATCTCAGGTGCAGCTGGTTCAGTCTGGCGCCGAAGTG |
| | | AAGAAACCTGGCTCCTCCGTGAAGGTGTCCTGCAAGGCTTCTGGCGGCACC |
| | | TTCTCCTCTTACGCCATCTCCTGGGTCCGACAGGCTCCTGGACAAGGCTTG |
| | | GAATGGATGGGCGGCATCATCCCCATCTTCGGCACCGCCAATTACGCCCAG |
| | | AAATTCCAGGGCAGAGTGACCATCACCGCCGACAAGTCTACCTCCACCGCC |
| | | TACATGGAACTGTCCAGCCTGAGATCTGAGGACACCGCCGTGTACTACTGT |
| | | GCCAGAGGCGGCTACTCTTACGGCTCCCTGGATTATTGGGGCCAGGGCACA |
| | | CTGGTCACCGTGTCCTCTGGTGGCGGAGGAAGCGGAGGCGGAGGTTCTGGC |
| | | GGCGGAGGATCTGACATCCAGATGACCCAGTCTCCATCCTCTCTGTCCGCC |
| | | TCTGTGGGCGACAGAGTGACCATCACCTGTCGGGCCTCTCAGTCCATCATC |
| | | TCCGACCTGAACTGGTATCAGCAGAAGCCCGGCAAGGCCCCTAAGCTGCTG |
| | | ATCCATGCTGCTTCCAGTCTGCAGTCTGGCGTGCCCTCTAGATTCTCCGGC |
| | | TCTGGCTCTGGCACCGACTTTACCCTGACAATCTCCAGCCTGCAGCCTGAG |
| | | GACTTCGCCACCTACTACTGCCAGCAGTCCTACAGCACCCCTTACACCTTT |
| | | GGCCAGGGCACCAAGCTGGAAATCAAG |
| SEQ ID | aCSF1R | ATGGAAACCGACACACTGCTGCTGTGGGTGCTGCTCTTGTGGGTGCCAGGA |
| NO: | BI117 VL- | TCTACAGGACAACTGGTGCTGACCCAGCCCCCTTCCGTCTCCGGCGCCCCG |
| 306 | hCLIg_v1- | GGCCAGCGCGTCACTATCTCCTGTACCGGCAGCTCCAGCAACATCGGAGCA |
| | 3 x 4GS-IL2 | GGATACGACGTGCACTGGTACCAACAGCTCCCCGGAACCGCGCCTAAGCTG |
| | | CTGATCTACGGGAACTCTAACCGGCCGTCCGGCGTGCCTGACCGCTTCAGC |
| | | GGATCGAAGTCCGGCACCAGCGCCTCCCTGGCCATCACTGGACTGCAGGCC |
| | | GAGGACGAAGCCGATTACTACTGCCAGTCCTACGACTCCTCCCTGTCCGAG |
| | | GAAGTGTTCGGAGGCGGGACGAAGCTCACCGTCCTGGGACAACCTAAGGCC |
| | | AATCCTACCGTGACACTGTTCCCTCCATCCTCCGAGGAACTGCAGGCCAAC |
| | | AAGGCTACCCTCGTGTGCCTGATCTCCGACTTTTACCCTGGCGCTGTGACC |
| | | GTGGCCTGGAAGGCTGATGGATCTCCTGTGAAGGCTGGCGTGGAAACCACC |
| | | AAGCCTTCCAAGCAGTCCAACAACAAATACGCCGCCTCCTCCTACCTGTCT |
| | | CTGACCCCTGAACAGTGGAAGTCCCACCGGTCCTACAGCTGCCAAGTGACC |
| | | CATGAGGGCTCCACCGTGGAAAAGACCGTGGCTCCTACCGAGTGCTCCGGT |
| | | GGCGGAGGAAGCGGAGGCGGAGGTTCTGGCGGCGGAGGATCTGCCCCTACC |
| | | AGCAGCAGCACCAAGAAAACCCAGCTCCAGCTCGAGCACCTCCTGCTGGAC |
| | | CTGCAGATGATCCTGAACGGCATCAACAACTACAAGAACCCCAAGCTGACC |
| | | CGGATGCTGACCTTCAAGTTCTACATGCCCAAGAAGGCCACCGAGCTGAAG |
| | | CACCTCCAGTGCCTGGAAGAGGAACTGAAGCCCCTGGAAGAAGTGCTGAAC |
| | | CTGGCCCAGAGCAAGAACTTCCACCTGAGGCCCAGGGACCTGATCAGCAAC |
| | | ATCAACGTGATCGTGCTGGAACTGAAAGGCAGCGAGACAACCTTCATGTGC |
| | | GAGTACGCCGACGAGACAGCCACCATCGTGGAATTTCTGAACCGGTGGATC |
| | | ACCTTCTGCCAGAGCATCATCAGCACCCTGACA |
| SEQ ID | aCSF1R | ATGGAAACCGACACACTGCTGCTGTGGGTGCTGCTCTTGTGGGTGCCAGGA |
| NO: | BI117 VL- | TCTACAGGACAACTGGTGCTGACCCAGCCCCCTTCCGTCTCCGGCGCCCCG |
| 307 | hCLIg_v1- | GGCCAGCGCGTCACTATCTCCTGTACCGGCAGCTCCAGCAACATCGGAGCA |
| | IL2 | GGATACGACGTGCACTGGTACCAACAGCTCCCCGGAACCGCGCCTAAGCTG |
| | | CTGATCTACGGGAACTCTAACCGGCCGTCCGGCGTGCCTGACCGCTTCAGC |
| | | GGATCGAAGTCCGGCACCAGCGCCTCCCTGGCCATCACTGGACTGCAGGCC |
| | | GAGGACGAAGCCGATTACTACTGCCAGTCCTACGACTCCTCCCTGTCCGAG |
| | | GAAGTGTTCGGAGGCGGGACGAAGCTCACCGTCCTGGGACAACCTAAGGCC |
| | | AATCCTACCGTGACACTGTTCCCTCCATCCTCCGAGGAACTGCAGGCCAAC |
| | | AAGGCTACCCTCGTGTGCCTGATCTCCGACTTTTACCCTGGCGCTGTGACC |
| | | GTGGCCTGGAAGGCTGATGGATCTCCTGTGAAGGCTGGCGTGGAAACCACC |
| | | AAGCCTTCCAAGCAGTCCAACAACAAATACGCCGCCTCCTCCTACCTGTCT |
| | | CTGACCCCTGAACAGTGGAAGTCCCACCGGTCCTACAGCTGCCAAGTGACC |
| | | CATGAGGGCTCCACCGTGGAAAAGACCGTGGCTCCTACCGAGTGCTCCGCC |
| | | CCTACCAGCAGCAGCACCAAGAAAACCCAGCTCCAGCTCGAGCACCTCCTG |
| | | CTGGACCTGCAGATGATCCTGAACGGCATCAACAACTACAAGAACCCCAAG |
| | | CTGACCCGGATGCTGACCTTCAAGTTCTACATGCCCAAGAAGGCCACCGAG |
| | | CTGAAGCACCTCCAGTGCCTGGAAGAGGAACTGAAGCCCCTGGAAGAAGTG |
| | | CTGAACCTGGCCCAGAGCAAGAACTTCCACCTGAGGCCCAGGGACCTGATC |
| | | AGCAACATCAACGTGATCGTGCTGGAACTGAAAGGCAGCGAGACAACCTTC |
| | | ATGTGCGAGTACGCCGACGAGACAGCCACCATCGTGGAATTTCTGAACCGG |
| | | TGGATCACCTTCTGCCAGAGCATCATCAGCACCCTGACA |
| SEQ ID | aCSF1R | ATGGAAACCGACACACTGCTGCTGTGGGTGCTGCTCTTGTGGGTGCCAGGA |
| NO: | BI123 VL- | TCTACAGGATCCCTCGTGCTGACCCAACCTCCTTCAGTCTCCGTGGCCCCC |
| 308 | hCLIg_v1- | GGCAAGACCGCCCGCATCACCTGTGGCGGTAACAACATCGGCTCCAAGTCA |
| | 3 x 4GS-IL2 | GTCCACTGGTACCAGCAGAAGCCGGGCCAAGCTCCCGTGCTGGTCGTGTAC |
| | | GACGACTCAGACCGCCCCAGCGGTATCCCTGAGAGATTTAGCGGATCCAAC |
| | | TCCGGGAACACCGCTACCCTGACCATCTCAAGGGTGGAGGCCGGAGACGAA |
| | | GCCGACTACTACTGCCAGGTGTGGGATTCCAGCTCCGACCACGTGGTGTTC |
| | | GGCGGCGGCACTCAGCTCACCGTGCTGGGACAACCTAAGGCCAATCCTACC |
| | | GTGACACTGTTCCCTCCATCCTCCGAGGAACTGCAGGCCAACAAGGCTACC |
| | | CTCGTGTGCCTGATCTCCGACTTTTACCCTGGCGCTGTGACCGTGGCCTGG |
| | | AAGGCTGATGGATCTCCTGTGAAGGCTGGCGTGGAAACCACCAAGCCTTCC |
| | | AAGCAGTCCAACAACAAATACGCCGCCTCCTCCTACCTGTCTCTGACCCCT |
| | | GAACAGTGGAAGTCCCACCGGTCCTACAGCTGCCAAGTGACCCATGAGGGC |
| | | TCCACCGTGGAAAAGACCGTGGCTCCTACCGAGTGCTCCGGTGGCGGAGGA |
| | | AGCGGAGGCGGAGGTTCTGGCGGCGGAGGATCTGCCCCTACCAGCAGCAGC |
| | | ACCAAGAAAACCCAGCTCCAGCTCGAGCACCTCCTGCTGGACCTGCAGATG |
| | | ATCCTGAACGGCATCAACAACTACAAGAACCCCAAGCTGACCCGGATGCTG |
| | | ACCTTCAAGTTCTACATGCCCAAGAAGGCCACCGAGCTGAAGCACCTCCAG |
| | | TGCCTGGAAGAGGAACTGAAGCCCCTGGAAGAAGTGCTGAACCTGGCCCAG |
| | | AGCAAGAACTTCCACCTGAGGCCCAGGGACCTGATCAGCAACATCAACGTG |
| | | ATCGTGCTGGAACTGAAAGGCAGCGAGACAACCTTCATGTGCGAGTACGCC |
| | | GACGAGACAGCCACCATCGTGGAATTTCTGAACCGGTGGATCACCTTCTGC |
| | | CAGAGCATCATCAGCACCCTGACA |
| SEQ ID | aCSF1R | ATGGAAACCGACACACTGCTGCTGTGGGTGCTGCTCTTGTGGGTGCCAGGA |
| NO: | BI123 VL- | TCTACAGGATCCCTCGTGCTGACCCAACCTCCTTCAGTCTCCGTGGCCCCC |
| 309 | hCLIg_v1- | GGCAAGACCGCCCGCATCACCTGTGGCGGTAACAACATCGGCTCCAAGTCA |
| | IL2 | GTCCACTGGTACCAGCAGAAGCCGGGCCAAGCTCCCGTGCTGGTCGTGTAC |
| | | GACGACTCAGACCGCCCCAGCGGTATCCCTGAGAGATTTAGCGGATCCAAC |
| | | TCCGGGAACACCGCTACCCTGACCATCTCAAGGGTGGAGGCCGGAGACGAA |
| | | GCCGACTACTACTGCCAGGTGTGGGATTCCAGCTCCGACCACGTGGTGTTC |
| | | GGCGGCGGCACTCAGCTCACCGTGCTGGGACAACCTAAGGCCAATCCTACC |
| | | GTGACACTGTTCCCTCCATCCTCCGAGGAACTGCAGGCCAACAAGGCTACC |
| | | CTCGTGTGCCTGATCTCCGACTTTTACCCTGGCGCTGTGACCGTGGCCTGG |
| | | AAGGCTGATGGATCTCCTGTGAAGGCTGGCGTGGAAACCACCAAGCCTTCC |
| | | AAGCAGTCCAACAACAAATACGCCGCCTCCTCCTACCTGTCTCTGACCCCT |
| | | GAACAGTGGAAGTCCCACCGGTCCTACAGCTGCCAAGTGACCCATGAGGGC |
| | | TCCACCGTGGAAAAGACCGTGGCTCCTACCGAGTGCTCCGCCCCTACCAGC |
| | | AGCAGCACCAAGAAAACCCAGCTCCAGCTCGAGCACCTCCTGCTGGACCTG |
| | | CAGATGATCCTGAACGGCATCAACAACTACAAGAACCCCAAGCTGACCCGG |
| | | ATGCTGACCTTCAAGTTCTACATGCCCAAGAAGGCCACCGAGCTGAAGCAC |
| | | CTCCAGTGCCTGGAAGAGGAACTGAAGCCCCTGGAAGAAGTGCTGAACCTG |
| | | GCCCAGAGCAAGAACTTCCACCTGAGGCCCAGGGACCTGATCAGCAACATC |
| | | AACGTGATCGTGCTGGAACTGAAAGGCAGCGAGACAACCTTCATGTGCGAG |
| | | TACGCCGACGAGACAGCCACCATCGTGGAATTTCTGAACCGGTGGATCACC |
| | | TTCTGCCAGAGCATCATCAGCACCCTGACA |
| SEQ ID | aCCR2 | ATGGAAACCGACACACTGCTGCTGTGGGTGCTGCTCTTGTGGGTGCCAGGA |
| NO: | VL- | TCTACAGGAGACGTCGTCATGACCCAATCCCCGCTCTCCCTGCCGGTGACT |
| 310 | hCLIg_vk- | CTCGGCCAGCCGGCGTCCATCTCGTGCAAGTCCTCCCAATCCCTGCTGGAT |
| | 3 x 4GS-IL2 | TCGGATGGGAAGACTTTCCTGAACTGGCTGCAGCAACGGCCCGGCCAGTCG |
| | | CCACGGCGGCTGATCTACCTGGTGTCCAAGCTGGATTCAGGTGTGCCTGAT |
| | | AGATTCTCCGGCAGCGGATCGGGGACCGACTTCACGCTGAAGATCTCCAGA |
| | | GTGGAAGCAGAGGACGTGGGCGTCTATTACTGTTGGCAGGGGACTCATTTC |
| | | CCCTATACCTTTGGAGGTGGTACTAAGGTGGAAATTAAGAGAACAGTGGCC |
| | | GCTCCTTCCGTGTTCATCTTCCCACCCTCCGACGAGCAGCTGAAGTCCGGC |
| | | ACCGCTTCTGTCGTGTGCCTGCTCAACAACTTCTACCCTCGGGAAGCCAAG |
| | | GTGCAGTGGAAGGTGGACAACGCCCTGCAGTCCGGCAACTCCCAGGAATCC |
| | | GTCACCGAGCAGGACTCCAAGGACAGCACCTACTCCCTGTCCTCCACCCTG |
| | | ACCCTGTCCAAGGCCGACTACGAGAAGCACAAGGTGTACGCCTGCGAAGTG |
| | | ACCCACCAGGGCCTGAGCAGCCCCGTGACCAAGTCCTTCAACCGGGGCGAG |
| | | TGCGGTGGCGGAGGAAGCGGAGGCGGAGGTTCTGGCGGCGGAGGATCTGCC |
| | | CCTACCAGCAGCAGCACCAAGAAAACCCAGCTCCAGCTCGAGCACCTCCTG |
| | | CTGGACCTGCAGATGATCCTGAACGGCATCAACAACTACAAGAACCCCAAG |
| | | CTGACCCGGATGCTGACCTTCAAGTTCTACATGCCCAAGAAGGCCACCGAG |
| | | CTGAAGCACCTCCAGTGCCTGGAAGAGGAACTGAAGCCCCTGGAAGAAGTG |
| | | CTGAACCTGGCCCAGAGCAAGAACTTCCACCTGAGGCCCAGGGACCTGATC |
| | | AGCAACATCAACGTGATCGTGCTGGAACTGAAAGGCAGCGAGACAACCTTC |
| | | ATGTGCGAGTACGCCGACGAGACAGCCACCATCGTGGAATTTCTGAACCGG |
| | | TGGATCACCTTCTGCCAGAGCATCATCAGCACCCTGACA |
| SEQ ID | aCCR2 | ATGGAAACCGACACACTGCTGCTGTGGGTGCTGCTCTTGTGGGTGCCAGGA |
| NO: | VL- | TCTACAGGAGACGTCGTCATGACCCAATCCCCGCTCTCCCTGCCGGTGACT |
| 311 | hCLIg_vk- | CTCGGCCAGCCGGCGTCCATCTCGTGCAAGTCCTCCCAATCCCTGCTGGAT |
| | IL2 | TCGGATGGGAAGACTTTCCTGAACTGGCTGCAGCAACGGCCCGGCCAGTCG |
| | | CCACGGCGGCTGATCTACCTGGTGTCCAAGCTGGATTCAGGTGTGCCTGAT |
| | | AGATTCTCCGGCAGCGGATCGGGGACCGACTTCACGCTGAAGATCTCCAGA |
| | | GTGGAAGCAGAGGACGTGGGCGTCTATTACTGTTGGCAGGGGACTCATTTC |
| | | CCCTATACCTTTGGAGGTGGTACTAAGGTGGAAATTAAGAGAACAGTGGCC |
| | | GCTCCTTCCGTGTTCATCTTCCCACCCTCCGACGAGCAGCTGAAGTCCGGC |
| | | ACCGCTTCTGTCGTGTGCCTGCTCAACAACTTCTACCCTCGGGAAGCCAAG |
| | | GTGCAGTGGAAGGTGGACAACGCCCTGCAGTCCGGCAACTCCCAGGAATCC |
| | | GTCACCGAGCAGGACTCCAAGGACAGCACCTACTCCCTGTCCTCCACCCTG |
| | | ACCCTGTCCAAGGCCGACTACGAGAAGCACAAGGTGTACGCCTGCGAAGTG |
| | | ACCCACCAGGGCCTGAGCAGCCCCGTGACCAAGTCCTTCAACCGGGGCGAG |
| | | TGCGCCCCTACCAGCAGCAGCACCAAGAAAACCCAGCTCCAGCTCGAGCAC |
| | | CTCCTGCTGGACCTGCAGATGATCCTGAACGGCATCAACAACTACAAGAAC |
| | | CCCAAGCTGACCCGGATGCTGACCTTCAAGTTCTACATGCCCAAGAAGGCC |
| | | ACCGAGCTGAAGCACCTCCAGTGCCTGGAAGAGGAACTGAAGCCCCTGGAA |
| | | GAAGTGCTGAACCTGGCCCAGAGCAAGAACTTCCACCTGAGGCCCAGGGAC |
| | | CTGATCAGCAACATCAACGTGATCGTGCTGGAACTGAAAGGCAGCGAGACA |
| | | ACCTTCATGTGCGAGTACGCCGACGAGACAGCCACCATCGTGGAATTTCTG |
| | | AACCGGTGGATCACCTTCTGCCAGAGCATCATCAGCACCCTGACA |
| SEQ ID | aCSF1R | ATGGAAACCGACACACTGCTGCTGTGGGTGCTGCTCTTGTGGGTGCCAGGA |
| NO: | BI117 VH- | TCTACAGGAGAAGTGCAGCTGGTCGAAAGCGGAGGGGGTCTGGTCCAGCCT |
| 312 | hCH1- | GGAGGGTCCCTGCGGCTGTCCTGCGCCGCTTCCGGCTTCACCTTCTCCAAC |
| | hFc_Hole- | GATGAAATGAACTGGATCCGCCAAGCCCCTGGAAAGGGCCTGGAATGGGTG |
| | 3 x 4GS- | TCGTACATCTCGAGCAGGTCCAGCACTATCTACTATGCCGACGCGGTGAAG |
| | TGFbR2 | GGACGCTTCACTATCAGCCGCGATAACGCACGCAATTCCCTCTACCTGCAG |
| | | ATGAACTCGCTCAGAGCTGAGGATACTGCCGTCTACTACTGCGCCCGCGGC |
| | | GTGGACGGCGATTTTTCCTTCGATTACTGGGGACAGGGCACTCTTGTCACC |
| | | GTGTCAAGCGCTTCTACCAAGGGACCCAGCGTGTTCCCTCTGGCTCCTTCC |
| | | AGCAAGTCTACCTCTGGCGGAACAGCTGCTCTGGGCTGCCTGGTCAAGGAC |
| | | TACTTTCCTGAGCCTGTGACCGTGTCTTGGAACTCTGGCGCTCTGACATCC |
| | | GGCGTGCACACATTTCCAGCTGTGCTGCAGTCCTCCGGCCTGTACTCTCTG |
| | | TCCTCTGTCGTGACCGTGCCTTCCAGCTCTCTGGGAACCCAGACCTACATC |
| | | TGCAATGTGAACCACAAGCCTTCCAACACCAAGGTGGACAAGAGAGTGGAA |
| | | CCCAAGTCCTGCGATAAGACCCACACCTGTCCTCCCTGCCCTGCCCCTGAA |
| | | CTGCTGGGCGGACCTAGCGTGTTCCTGTTCCCTCCAAAGCCCAAGGACACC |
| | | CTGATGATCAGCCGGACCCCTGAAGTGACCTGCGTGGTGGTGGATGTGTCC |
| | | CACGAGGATCCCGAAGTGAAGTTCAATTGGTACGTGGACGGCGTGGAAGTG |
| | | CACAACGCCAAGACCAAGCCCAGAGAGGAACAGTACAACAGCACCTACCGG |
| | | GTGGTGTCCGTGCTGACCGTGCTGCACCAGGACTGGCTGAACGGCAAAGAG |
| | | TACAAGTGCAAGGTGTCCAACAAGGCCCTGCCAGCCCCTATCGAGAAAACC |
| | | ATCAGCAAGGCCAAGGGCCAGCCTAGAGAGCCTCAGGTCTGCACCCTGCCT |
| | | CCCAGCCGGGAAGAGATGACCAAGAACCAGGTGTCCCTGAGCTGCGCCGTG |
| | | AAGGGCTTCTACCCCTCCGATATCGCCGTGGAATGGGAGAGCAACGGCCAG |
| | | CCCGAGAACAACTACAAGACCACCCCTCCCGTGCTGGACAGCGACGGCAGC |
| | | TTCTTCCTGGTGTCCAAACTGACCGTGGACAAGAGCCGGTGGCAGCAGGGC |
| | | AATGTGTTCAGCTGTAGCGTGATGCACGAGGCCCTGCACAACCACTACACC |
| | | CAGAAGTCTCTGAGCCTGAGCCCTGGCAAAGGTGGCGGAGGAAGCGGAGGC |
| | | GGAGGTTCTGGCGGCGGAGGATCTATTCCTCCACACGTGCAAAAGTCGGTG |
| | | AACAATGATATGATCGTCACCGACAACAACGGAGCCGTGAAGTTTCCTCAG |
| | | CTGTGCAAGTTTTGTGATGTCCGCTTCAGCACCTGTGACAACCAGAAGTCA |
| | | TGCATGTCGAACTGTTCGATCACCAGCATTTGCGAAAAGCCTCAAGAGGTG |
| | | TGCGTGGCCGTGTGGCGCAAGAACGACGAAAACATCACTCTGGAAACCGTG |
| | | TGCCATGATCCTAAGCTCCCGTACCATGACTTCATTCTTGAAGATGCAGCC |
| | | TCCCCCAAGTGCATCATGAAGGAGAAGAAGAAGCCTGGCGAAACCTTCTTC |
| | | ATGTGCTCATGCAGCTCCGACGAATGTAACGACAACATCATCTTCTCAGAG |
| | | GAATACAACACCTCAAACCCGGAC |
| SEQ ID | aCSF1R | ATGGAAACCGACACACTGCTGCTGTGGGTGCTGCTCTTGTGGGTGCCAGGA |
| NO: | BI123 VH- | TCTACAGGACAGGTGCAGCTTGTGCAAAGCGGGGGAGGCGTGGTGCAGCCG |
| 313 | hCH1- | GGACGGAGCCTGCGGCTGTCGTGCGCCGCGAGCGGTTTCACCTTCTCCTCC |
| | hFc_Hole- | TACGCTATGCACTGGGTCCGCCAGGCGCCGGGCAAGGGCCTCGAATGGGTG |
| | 3 x 4GS- | GCCGTGATCAGCTACGATGGCTCCAACAAGTACTACGCCGACTCAGTGAAG |
| | TGFbR2 | GGAAGGTTCACCATCTCAAGAGATAACAGCAAGAACACGCTGTACCTCCAG |
| | | ATGAACTCCCTCCGGGCCGAAGACACAGCCGTCTACTACTGTGCGAGAGAG |
| | | CTCGATTACGGCGATTACGGCCTGGACGTGTGGGGCAAGGGAACCACGGTG |
| | | ACCGTCTCCTCCGCTTCTACCAAGGGACCCAGCGTGTTCCCTCTGGCTCCT |
| | | TCCAGCAAGTCTACCTCTGGCGGAACAGCTGCTCTGGGCTGCCTGGTCAAG |
| | | GACTACTTTCCTGAGCCTGTGACCGTGTCTTGGAACTCTGGCGCTCTGACA |
| | | TCCGGCGTGCACACATTTCCAGCTGTGCTGCAGTCCTCCGGCCTGTACTCT |
| | | CTGTCCTCTGTCGTGACCGTGCCTTCCAGCTCTCTGGGAACCCAGACCTAC |
| | | ATCTGCAATGTGAACCACAAGCCTTCCAACACCAAGGTGGACAAGAGAGTG |
| | | GAACCCAAGTCCTGCGATAAGACCCACACCTGTCCTCCCTGCCCTGCCCCT |
| | | GAACTGCTGGGCGGACCTAGCGTGTTCCTGTTCCCTCCAAAGCCCAAGGAC |
| | | ACCCTGATGATCAGCCGGACCCCTGAAGTGACCTGCGTGGTGGTGGATGTG |
| | | TCCCACGAGGATCCCGAAGTGAAGTTCAATTGGTACGTGGACGGCGTGGAA |
| | | GTGCACAACGCCAAGACCAAGCCCAGAGAGGAACAGTACAACAGCACCTAC |
| | | CGGGTGGTGTCCGTGCTGACCGTGCTGCACCAGGACTGGCTGAACGGCAAA |
| | | GAGTACAAGTGCAAGGTGTCCAACAAGGCCCTGCCAGCCCCTATCGAGAAA |
| | | ACCATCAGCAAGGCCAAGGGCCAGCCTAGAGAGCCTCAGGTCTGCACCCTG |
| | | CCTCCCAGCCGGGAAGAGATGACCAAGAACCAGGTGTCCCTGAGCTGCGCC |
| | | GTGAAGGGCTTCTACCCCTCCGATATCGCCGTGGAATGGGAGAGCAACGGC |
| | | CAGCCCGAGAACAACTACAAGACCACCCCTCCCGTGCTGGACAGCGACGGC |
| | | AGCTTCTTCCTGGTGTCCAAACTGACCGTGGACAAGAGCCGGTGGCAGCAG |
| | | GGCAATGTGTTCAGCTGTAGCGTGATGCACGAGGCCCTGCACAACCACTAC |
| | | ACCCAGAAGTCTCTGAGCCTGAGCCCTGGCAAAGGTGGCGGAGGAAGCGGA |
| | | GGCGGAGGTTCTGGCGGCGGAGGATCTATTCCTCCACACGTGCAAAAGTCG |
| | | GTGAACAATGATATGATCGTCACCGACAACAACGGAGCCGTGAAGTTTCCT |
| | | CAGCTGTGCAAGTTTTGTGATGTCCGCTTCAGCACCTGTGACAACCAGAAG |
| | | TCATGCATGTCGAACTGTTCGATCACCAGCATTTGCGAAAAGCCTCAAGAG |
| | | GTGTGCGTGGCCGTGTGGCGCAAGAACGACGAAAACATCACTCTGGAAACC |
| | | GTGTGCCATGATCCTAAGCTCCCGTACCATGACTTCATTCTTGAAGATGCA |
| | | GCCTCCCCCAAGTGCATCATGAAGGAGAAGAAGAAGCCTGGCGAAACCTTC |
| | | TTCATGTGCTCATGCAGCTCCGACGAATGTAACGACAACATCATCTTCTCA |
| | | GAGGAATACAACACCTCAAACCCGGAC |
| SEQ ID | aCCR2 | ATGGAAACCGACACACTGCTGCTGTGGGTGCTGCTCTTGTGGGTGCCAGGA |
| NO: | Hum1 VH- | TCTACAGGAGAAGTGCAGCTGGTGGAAAGCGGTGGCGGTCTGGTGCAGCCT |
| 314 | hCH1- | GGCGGTTCCCTCCGGCTGTCATGTGCTGCCTCCGGATTCTCGTTCAACGCG |
| | hFc_Knob- | TATGCCATGAACTGGGTGAGGCAGGCCCCGGGAAAGGGACTGGAATGGGTG |
| | 3 x 4GS- | GGGAGAATCCGGACCAAGAACAATAACTACGCTACTTACTACGCCGACTCC |
| | TGFbR2 | GTCAAGGACCGGTTCACAATTTCCCGGGACGACAGCAAGAGCTCACTGTAC |
| | | CTTCAGATGAACAGCCTCAAAACCGAGGACACCGCCGTGTACTACTGTGCC |
| | | ACCTTTTACGGCAACGGTGTGTGGGGACAGGGAACAACTGTCACCGTGTCC |
| | | TCCGCTTCTACCAAGGGACCCAGCGTGTTCCCTCTGGCTCCTTCCAGCAAG |
| | | TCTACCTCTGGCGGAACAGCTGCTCTGGGCTGCCTGGTCAAGGACTACTTT |
| | | CCTGAGCCTGTGACCGTGTCTTGGAACTCTGGCGCTCTGACATCCGGCGTG |
| | | CACACATTTCCAGCTGTGCTGCAGTCCTCCGGCCTGTACTCTCTGTCCTCT |
| | | GTCGTGACCGTGCCTTCCAGCTCTCTGGGAACCCAGACCTACATCTGCAAT |
| | | GTGAACCACAAGCCTTCCAACACCAAGGTGGACAAGAGAGTGGAACCCAAG |
| | | TCCTGCGATAAGACCCACACATGTCCTCCATGCCCTGCCCCTGAGCTGCTG |
| | | GGCGGACCTTCCGTGTTCCTGTTCCCTCCAAAGCCCAAGGACACCCTGATG |
| | | ATCAGCCGGACCCCTGAAGTGACCTGCGTGGTGGTGGATGTGTCCCACGAG |
| | | GATCCCGAAGTGAAGTTCAATTGGTACGTGGACGGCGTGGAAGTGCACAAC |
| | | GCCAAGACCAAGCCCAGAGAGGAACAGTACAACAGCACCTACCGGGTGGTG |
| | | TCCGTGCTGACCGTGCTGCATCAGGACTGGCTGAACGGCAAAGAGTACAAG |
| | | TGCAAGGTGTCCAACAAGGCCCTGCCTGCCCCTATCGAGAAAACCATCAGC |
| | | AAGGCCAAGGGCCAGCCCCGCGAACCTCAGGTGTACACACTGCCTCCCTGC |
| | | CGGGAAGAGATGACCAAGAACCAGGTGTCCCTGTGGTGCCTGGTCAAGGGC |
| | | TTCTACCCCTCCGATATCGCCGTGGAATGGGAGAGCAACGGCCAGCCCGAG |
| | | AACAACTACAAGACCACCCCTCCCGTGCTGGACAGCGACGGCAGCTTCTTC |
| | | CTGTACTCCAAACTGACCGTGGACAAGAGCCGGTGGCAGCAGGGCAATGTG |
| | | TTCAGCTGTAGCGTGATGCACGAGGCCCTGCACAACCACTACACCCAGAAG |
| | | TCCCTGAGCCTGTCTCCTGGCAAAGGTGGCGGAGGAAGCGGAGGCGGAGGT |
| | | TCTGGCGGCGGAGGATCTATTCCTCCACACGTGCAAAAGTCGGTGAACAAT |
| | | GATATGATCGTCACCGACAACAACGGAGCCGTGAAGTTTCCTCAGCTGTGC |
| | | AAGTTTTGTGATGTCCGCTTCAGCACCTGTGACAACCAGAAGTCATGCATG |
| | | TCGAACTGTTCGATCACCAGCATTTGCGAAAAGCCTCAAGAGGTGTGCGTG |
| | | GCCGTGTGGCGCAAGAACGACGAAAACATCACTCTGGAAACCGTGTGCCAT |
| | | GATCCTAAGCTCCCGTACCATGACTTCATTCTTGAAGATGCAGCCTCCCCC |
| | | AAGTGCATCATGAAGGAGAAGAAGAAGCCTGGCGAAACCTTCTTCATGTGC |
| | | TCATGCAGCTCCGACGAATGTAACGACAACATCATCTTCTCAGAGGAATAC |
| | | AACACCTCAAACCCGGAC |
| SEQ ID | aCSF1R | ATGGAAACCGACACACTGCTGCTGTGGGTGCTGCTCTTGTGGGTGCCAGGA |
| NO: | BI117 VH- | TCTACAGGAGAAGTGCAGCTGGTCGAAAGCGGAGGGGGTCTGGTCCAGCCT |
| 315 | 3 x 4GS- | GGAGGGTCCCTGCGGCTGTCCTGCGCCGCTTCCGGCTTCACCTTCTCCAAC |
| | aCSF1R | GATGAAATGAACTGGATCCGCCAAGCCCCTGGAAAGGGCCTGGAATGGGTG |
| | BI117 VL- | TCGTACATCTCGAGCAGGTCCAGCACTATCTACTATGCCGACGCGGTGAAG |
| | 4GS- | GGACGCTTCACTATCAGCCGCGATAACGCACGCAATTCCCTCTACCTGCAG |
| | hFc_Hole | ATGAACTCGCTCAGAGCTGAGGATACTGCCGTCTACTACTGCGCCCGCGGC |
| | | GTGGACGGCGATTTTTCCTTCGATTACTGGGGACAGGGCACTCTTGTCACC |
| | | GTGTCAAGCGGTGGCGGAGGAAGCGGAGGCGGAGGTTCTGGCGGCGGAGGA |
| | | TCTCAACTGGTGCTGACCCAGCCCCCTTCCGTCTCCGGCGCCCCGGGCCAG |
| | | CGCGTCACTATCTCCTGTACCGGCAGCTCCAGCAACATCGGAGCAGGATAC |
| | | GACGTGCACTGGTACCAACAGCTCCCCGGAACCGCGCCTAAGCTGCTGATC |
| | | TACGGGAACTCTAACCGGCCGTCCGGCGTGCCTGACCGCTTCAGCGGATCG |
| | | AAGTCCGGCACCAGCGCCTCCCTGGCCATCACTGGACTGCAGGCCGAGGAC |
| | | GAAGCCGATTACTACTGCCAGTCCTACGACTCCTCCCTGTCCGAGGAAGTG |
| | | TTCGGAGGCGGGACGAAGCTCACCGTCCTGGGTGGCGGAGGAAGCGATAAG |
| | | ACCCACACCTGTCCTCCCTGCCCTGCCCCTGAACTGCTGGGCGGACCTAGC |
| | | GTGTTCCTGTTCCCTCCAAAGCCCAAGGACACCCTGATGATCAGCCGGACC |
| | | CCTGAAGTGACCTGCGTGGTGGTGGATGTGTCCCACGAGGATCCCGAAGTG |
| | | AAGTTCAATTGGTACGTGGACGGCGTGGAAGTGCACAACGCCAAGACCAAG |
| | | CCCAGAGAGGAACAGTACAACAGCACCTACCGGGTGGTGTCCGTGCTGACC |
| | | GTGCTGCACCAGGACTGGCTGAACGGCAAAGAGTACAAGTGCAAGGTGTCC |
| | | AACAAGGCCCTGCCAGCCCCTATCGAGAAAACCATCAGCAAGGCCAAGGGC |
| | | CAGCCTAGAGAGCCTCAGGTCTGCACCCTGCCTCCCAGCCGGGAAGAGATG |
| | | ACCAAGAACCAGGTGTCCCTGAGCTGCGCCGTGAAGGGCTTCTACCCCTCC |
| | | GATATCGCCGTGGAATGGGAGAGCAACGGCCAGCCCGAGAACAACTACAAG |
| | | ACCACCCCTCCCGTGCTGGACAGCGACGGCAGCTTCTTCCTGGTGTCCAAA |
| | | CTGACCGTGGACAAGAGCCGGTGGCAGCAGGGCAATGTGTTCAGCTGTAGC |
| | | GTGATGCACGAGGCCCTGCACAACCACTACACCCAGAAGTCTCTGAGCCTG |
| | | AGCCCTGGCAAA |
| SEQ ID | aCSF1R | ATGGAAACCGACACACTGCTGCTGTGGGTGCTGCTCTTGTGGGTGCCAGGA |
| NO: | BI123 VH- | TCTACAGGACAGGTGCAGCTTGTGCAAAGCGGGGGAGGCGTGGTGCAGCCG |
| 316 | 3 x 4GS- | GGACGGAGCCTGCGGCTGTCGTGCGCCGCGAGCGGTTTCACCTTCTCCTCC |
| | aCSF1R | TACGCTATGCACTGGGTCCGCCAGGCGCCGGGCAAGGGCCTCGAATGGGTG |
| | BI123 VL- | GCCGTGATCAGCTACGATGGCTCCAACAAGTACTACGCCGACTCAGTGAAG |
| | 4GS- | GGAAGGTTCACCATCTCAAGAGATAACAGCAAGAACACGCTGTACCTCCAG |
| | hFc_Hole | ATGAACTCCCTCCGGGCCGAAGACACAGCCGTCTACTACTGTGCGAGAGAG |
| | | CTCGATTACGGCGATTACGGCCTGGACGTGTGGGGCAAGGGAACCACGGTG |
| | | ACCGTCTCCTCCGGTGGCGGAGGAAGCGGAGGCGGAGGTTCTGGCGGCGGA |
| | | GGATCTTCCCTCGTGCTGACCCAACCTCCTTCAGTCTCCGTGGCCCCCGGC |
| | | AAGACCGCCCGCATCACCTGTGGCGGTAACAACATCGGCTCCAAGTCAGTC |
| | | CACTGGTACCAGCAGAAGCCGGGCCAAGCTCCCGTGCTGGTCGTGTACGAC |
| | | GACTCAGACCGCCCCAGCGGTATCCCTGAGAGATTTAGCGGATCCAACTCC |
| | | GGGAACACCGCTACCCTGACCATCTCAAGGGTGGAGGCCGGAGACGAAGCC |
| | | GACTACTACTGCCAGGTGTGGGATTCCAGCTCCGACCACGTGGTGTTCGGC |
| | | GGCGGCACTCAGCTCACCGTGCTGGGTGGCGGAGGAAGCGATAAGACCCAC |
| | | ACCTGTCCTCCCTGCCCTGCCCCTGAACTGCTGGGCGGACCTAGCGTGTTC |
| | | CTGTTCCCTCCAAAGCCCAAGGACACCCTGATGATCAGCCGGACCCCTGAA |
| | | GTGACCTGCGTGGTGGTGGATGTGTCCCACGAGGATCCCGAAGTGAAGTTC |
| | | AATTGGTACGTGGACGGCGTGGAAGTGCACAACGCCAAGACCAAGCCCAGA |
| | | GAGGAACAGTACAACAGCACCTACCGGGTGGTGTCCGTGCTGACCGTGCTG |
| | | CACCAGGACTGGCTGAACGGCAAAGAGTACAAGTGCAAGGTGTCCAACAAG |
| | | GCCCTGCCAGCCCCTATCGAGAAAACCATCAGCAAGGCCAAGGGCCAGCCT |
| | | AGAGAGCCTCAGGTCTGCACCCTGCCTCCCAGCCGGGAAGAGATGACCAAG |
| | | AACCAGGTGTCCCTGAGCTGCGCCGTGAAGGGCTTCTACCCCTCCGATATC |
| | | GCCGTGGAATGGGAGAGCAACGGCCAGCCCGAGAACAACTACAAGACCACC |
| | | CCTCCCGTGCTGGACAGCGACGGCAGCTTCTTCCTGGTGTCCAAACTGACC |
| | | GTGGACAAGAGCCGGTGGCAGCAGGGCAATGTGTTCAGCTGTAGCGTGATG |
| | | CACGAGGCCCTGCACAACCACTACACCCAGAAGTCTCTGAGCCTGAGCCCT |
| | | GGCAAA |
| SEQ ID | aCSF1R | ATGGAAACCGACACACTGCTGCTGTGGGTGCTGCTCTTGTGGGTGCCAGGA |
| NO: | BI117 VH- | TCTACAGGAGAAGTGCAGCTGGTCGAAAGCGGAGGGGGTCTGGTCCAGCCT |
| 317 | 3 x 4GS- | GGAGGGTCCCTGCGGCTGTCCTGCGCCGCTTCCGGCTTCACCTTCTCCAAC |
| | aCSF1R | GATGAAATGAACTGGATCCGCCAAGCCCCTGGAAAGGGCCTGGAATGGGTG |
| | BI117 VL- | TCGTACATCTCGAGCAGGTCCAGCACTATCTACTATGCCGACGCGGTGAAG |
| | 4GS- | GGACGCTTCACTATCAGCCGCGATAACGCACGCAATTCCCTCTACCTGCAG |
| | hFc_Hole- | ATGAACTCGCTCAGAGCTGAGGATACTGCCGTCTACTACTGCGCCCGCGGC |
| | 3 x 4GS- | GTGGACGGCGATTTTTCCTTCGATTACTGGGGACAGGGCACTCTTGTCACC |
| | TGFbR2 | GTGTCAAGCGGTGGCGGAGGAAGCGGAGGCGGAGGTTCTGGCGGCGGAGGA |
| | | TCTCAACTGGTGCTGACCCAGCCCCCTTCCGTCTCCGGCGCCCCGGGCCAG |
| | | CGCGTCACTATCTCCTGTACCGGCAGCTCCAGCAACATCGGAGCAGGATAC |
| | | GACGTGCACTGGTACCAACAGCTCCCCGGAACCGCGCCTAAGCTGCTGATC |
| | | TACGGGAACTCTAACCGGCCGTCCGGCGTGCCTGACCGCTTCAGCGGATCG |
| | | AAGTCCGGCACCAGCGCCTCCCTGGCCATCACTGGACTGCAGGCCGAGGAC |
| | | GAAGCCGATTACTACTGCCAGTCCTACGACTCCTCCCTGTCCGAGGAAGTG |
| | | TTCGGAGGCGGGACGAAGCTCACCGTCCTGGGTGGCGGAGGAAGCGATAAG |
| | | ACCCACACCTGTCCTCCCTGCCCTGCCCCTGAACTGCTGGGCGGACCTAGC |
| | | GTGTTCCTGTTCCCTCCAAAGCCCAAGGACACCCTGATGATCAGCCGGACC |
| | | CCTGAAGTGACCTGCGTGGTGGTGGATGTGTCCCACGAGGATCCCGAAGTG |
| | | AAGTTCAATTGGTACGTGGACGGCGTGGAAGTGCACAACGCCAAGACCAAG |
| | | CCCAGAGAGGAACAGTACAACAGCACCTACCGGGTGGTGTCCGTGCTGACC |
| | | GTGCTGCACCAGGACTGGCTGAACGGCAAAGAGTACAAGTGCAAGGTGTCC |
| | | AACAAGGCCCTGCCAGCCCCTATCGAGAAAACCATCAGCAAGGCCAAGGGC |
| | | CAGCCTAGAGAGCCTCAGGTCTGCACCCTGCCTCCCAGCCGGGAAGAGATG |
| | | ACCAAGAACCAGGTGTCCCTGAGCTGCGCCGTGAAGGGCTTCTACCCCTCC |
| | | GATATCGCCGTGGAATGGGAGAGCAACGGCCAGCCCGAGAACAACTACAAG |
| | | ACCACCCCTCCCGTGCTGGACAGCGACGGCAGCTTCTTCCTGGTGTCCAAA |
| | | CTGACCGTGGACAAGAGCCGGTGGCAGCAGGGCAATGTGTTCAGCTGTAGC |
| | | GTGATGCACGAGGCCCTGCACAACCACTACACCCAGAAGTCTCTGAGCCTG |
| | | AGCCCTGGCAAAGGTGGCGGAGGAAGCGGAGGCGGAGGTTCTGGCGGCGGA |
| | | GGATCTATTCCTCCACACGTGCAAAAGTCGGTGAACAATGATATGATCGTC |
| | | ACCGACAACAACGGAGCCGTGAAGTTTCCTCAGCTGTGCAAGTTTTGTGAT |
| | | GTCCGCTTCAGCACCTGTGACAACCAGAAGTCATGCATGTCGAACTGTTCG |
| | | ATCACCAGCATTTGCGAAAAGCCTCAAGAGGTGTGCGTGGCCGTGTGGCGC |
| | | AAGAACGACGAAAACATCACTCTGGAAACCGTGTGCCATGATCCTAAGCTC |
| | | CCGTACCATGACTTCATTCTTGAAGATGCAGCCTCCCCCAAGTGCATCATG |
| | | AAGGAGAAGAAGAAGCCTGGCGAAACCTTCTTCATGTGCTCATGCAGCTCC |
| | | GACGAATGTAACGACAACATCATCTTCTCAGAGGAATACAACACCTCAAAC |
| | | CCGGAC |
| SEQ ID | aCSF1R | ATGGAAACCGACACACTGCTGCTGTGGGTGCTGCTCTTGTGGGTGCCAGGA |
| NO: | BI123 VH- | TCTACAGGACAGGTGCAGCTTGTGCAAAGCGGGGGAGGCGTGGTGCAGCCG |
| 318 | 3 x 4GS- | GGACGGAGCCTGCGGCTGTCGTGCGCCGCGAGCGGTTTCACCTTCTCCTCC |
| | aCSF1R | TACGCTATGCACTGGGTCCGCCAGGCGCCGGGCAAGGGCCTCGAATGGGTG |
| | BI123 VL- | GCCGTGATCAGCTACGATGGCTCCAACAAGTACTACGCCGACTCAGTGAAG |
| | 4GS- | GGAAGGTTCACCATCTCAAGAGATAACAGCAAGAACACGCTGTACCTCCAG |
| | hFc_Hole- | ATGAACTCCCTCCGGGCCGAAGACACAGCCGTCTACTACTGTGCGAGAGAG |
| | 3 x 4GS- | CTCGATTACGGCGATTACGGCCTGGACGTGTGGGGCAAGGGAACCACGGTG |
| | TGFbR2 | ACCGTCTCCTCCGGTGGCGGAGGAAGCGGAGGCGGAGGTTCTGGCGGCGGA |
| | | GGATCTTCCCTCGTGCTGACCCAACCTCCTTCAGTCTCCGTGGCCCCCGGC |
| | | AAGACCGCCCGCATCACCTGTGGCGGTAACAACATCGGCTCCAAGTCAGTC |
| | | CACTGGTACCAGCAGAAGCCGGGCCAAGCTCCCGTGCTGGTCGTGTACGAC |
| | | GACTCAGACCGCCCCAGCGGTATCCCTGAGAGATTTAGCGGATCCAACTCC |
| | | GGGAACACCGCTACCCTGACCATCTCAAGGGTGGAGGCCGGAGACGAAGCC |
| | | GACTACTACTGCCAGGTGTGGGATTCCAGCTCCGACCACGTGGTGTTCGGC |
| | | GGCGGCACTCAGCTCACCGTGCTGGGTGGCGGAGGAAGCGATAAGACCCAC |
| | | ACCTGTCCTCCCTGCCCTGCCCCTGAACTGCTGGGCGGACCTAGCGTGTTC |
| | | CTGTTCCCTCCAAAGCCCAAGGACACCCTGATGATCAGCCGGACCCCTGAA |
| | | GTGACCTGCGTGGTGGTGGATGTGTCCCACGAGGATCCCGAAGTGAAGTTC |
| | | AATTGGTACGTGGACGGCGTGGAAGTGCACAACGCCAAGACCAAGCCCAGA |
| | | GAGGAACAGTACAACAGCACCTACCGGGTGGTGTCCGTGCTGACCGTGCTG |
| | | CACCAGGACTGGCTGAACGGCAAAGAGTACAAGTGCAAGGTGTCCAACAAG |
| | | GCCCTGCCAGCCCCTATCGAGAAAACCATCAGCAAGGCCAAGGGCCAGCCT |
| | | AGAGAGCCTCAGGTCTGCACCCTGCCTCCCAGCCGGGAAGAGATGACCAAG |
| | | AACCAGGTGTCCCTGAGCTGCGCCGTGAAGGGCTTCTACCCCTCCGATATC |
| | | GCCGTGGAATGGGAGAGCAACGGCCAGCCCGAGAACAACTACAAGACCACC |
| | | CCTCCCGTGCTGGACAGCGACGGCAGCTTCTTCCTGGTGTCCAAACTGACC |
| | | GTGGACAAGAGCCGGTGGCAGCAGGGCAATGTGTTCAGCTGTAGCGTGATG |
| | | CACGAGGCCCTGCACAACCACTACACCCAGAAGTCTCTGAGCCTGAGCCCT |
| | | GGCAAAGGTGGCGGAGGAAGCGGAGGCGGAGGTTCTGGCGGCGGAGGATCT |
| | | ATTCCTCCACACGTGCAAAAGTCGGTGAACAATGATATGATCGTCACCGAC |
| | | AACAACGGAGCCGTGAAGTTTCCTCAGCTGTGCAAGTTTTGTGATGTCCGC |
| | | TTCAGCACCTGTGACAACCAGAAGTCATGCATGTCGAACTGTTCGATCACC |
| | | AGCATTTGCGAAAAGCCTCAAGAGGTGTGCGTGGCCGTGTGGCGCAAGAAC |
| | | GACGAAAACATCACTCTGGAAACCGTGTGCCATGATCCTAAGCTCCCGTAC |
| | | CATGACTTCATTCTTGAAGATGCAGCCTCCCCCAAGTGCATCATGAAGGAG |
| | | AAGAAGAAGCCTGGCGAAACCTTCTTCATGTGCTCATGCAGCTCCGACGAA |
| | | TGTAACGACAACATCATCTTCTCAGAGGAATACAACACCTCAAACCCGGAC |
| SEQ ID | TGFbR2- | ATGGGCCGCGGACTTCTGCGCGGGCTGTGGCCTCTGCACATCGTGCTGTGG |
| NO: | 3 x 4GS- | ACCCGCATCGCGTCCACTATTCCTCCACACGTGCAAAAGTCGGTGAACAAT |
| 319 | hCH1- | GATATGATCGTCACCGACAACAACGGAGCCGTGAAGTTTCCTCAGCTGTGC |
| | hFc_Hole | AAGTTTTGTGATGTCCGCTTCAGCACCTGTGACAACCAGAAGTCATGCATG |
| | | TCGAACTGTTCGATCACCAGCATTTGCGAAAAGCCTCAAGAGGTGTGCGTG |
| | | GCCGTGTGGCGCAAGAACGACGAAAACATCACTCTGGAAACCGTGTGCCAT |
| | | GATCCTAAGCTCCCGTACCATGACTTCATTCTTGAAGATGCAGCCTCCCCC |
| | | AAGTGCATCATGAAGGAGAAGAAGAAGCCTGGCGAAACCTTCTTCATGTGC |
| | | TCATGCAGCTCCGACGAATGTAACGACAACATCATCTTCTCAGAGGAATAC |
| | | AACACCTCAAACCCGGACGGTGGCGGAGGAAGCGGAGGCGGAGGTTCTGGC |
| | | GGCGGAGGATCTGCTTCTACCAAGGGACCCAGCGTGTTCCCTCTGGCTCCT |
| | | TCCAGCAAGTCTACCTCTGGCGGAACAGCTGCTCTGGGCTGCCTGGTCAAG |
| | | GACTACTTTCCTGAGCCTGTGACCGTGTCTTGGAACTCTGGCGCTCTGACA |
| | | TCCGGCGTGCACACATTTCCAGCTGTGCTGCAGTCCTCCGGCCTGTACTCT |
| | | CTGTCCTCTGTCGTGACCGTGCCTTCCAGCTCTCTGGGAACCCAGACCTAC |
| | | ATCTGCAATGTGAACCACAAGCCTTCCAACACCAAGGTGGACAAGAGAGTG |
| | | GAACCCAAGTCCTGCGATAAGACCCACACCTGTCCTCCCTGCCCTGCCCCT |
| | | GAACTGCTGGGCGGACCTAGCGTGTTCCTGTTCCCTCCAAAGCCCAAGGAC |
| | | ACCCTGATGATCAGCCGGACCCCTGAAGTGACCTGCGTGGTGGTGGATGTG |
| | | TCCCACGAGGATCCCGAAGTGAAGTTCAATTGGTACGTGGACGGCGTGGAA |
| | | GTGCACAACGCCAAGACCAAGCCCAGAGAGGAACAGTACAACAGCACCTAC |
| | | CGGGTGGTGTCCGTGCTGACCGTGCTGCACCAGGACTGGCTGAACGGCAAA |
| | | GAGTACAAGTGCAAGGTGTCCAACAAGGCCCTGCCAGCCCCTATCGAGAAA |
| | | ACCATCAGCAAGGCCAAGGGCCAGCCTAGAGAGCCTCAGGTCTGCACCCTG |
| | | CCTCCCAGCCGGGAAGAGATGACCAAGAACCAGGTGTCCCTGAGCTGCGCC |
| | | GTGAAGGGCTTCTACCCCTCCGATATCGCCGTGGAATGGGAGAGCAACGGC |
| | | CAGCCCGAGAACAACTACAAGACCACCCCTCCCGTGCTGGACAGCGACGGC |
| | | AGCTTCTTCCTGGTGTCCAAACTGACCGTGGACAAGAGCCGGTGGCAGCAG |
| | | GGCAATGTGTTCAGCTGTAGCGTGATGCACGAGGCCCTGCACAACCACTAC |
| | | ACCCAGAAGTCTCTGAGCCTGAGCCCTGGCAAA |
| SEQ ID | TGFbR2- | ATGGGCCGCGGACTTCTGCGCGGGCTGTGGCCTCTGCACATCGTGCTGTGG |
| NO: | 3 x 4GS- | ACCCGCATCGCGTCCACTATTCCTCCACACGTGCAAAAGTCGGTGAACAAT |
| 320 | hCLIg_v1 | GATATGATCGTCACCGACAACAACGGAGCCGTGAAGTTTCCTCAGCTGTGC |
| | | AAGTTTTGTGATGTCCGCTTCAGCACCTGTGACAACCAGAAGTCATGCATG |
| | | TCGAACTGTTCGATCACCAGCATTTGCGAAAAGCCTCAAGAGGTGTGCGTG |
| | | GCCGTGTGGCGCAAGAACGACGAAAACATCACTCTGGAAACCGTGTGCCAT |
| | | GATCCTAAGCTCCCGTACCATGACTTCATTCTTGAAGATGCAGCCTCCCCC |
| | | AAGTGCATCATGAAGGAGAAGAAGAAGCCTGGCGAAACCTTCTTCATGTGC |
| | | TCATGCAGCTCCGACGAATGTAACGACAACATCATCTTCTCAGAGGAATAC |
| | | AACACCTCAAACCCGGACGGTGGCGGAGGAAGCGGAGGCGGAGGTTCTGGC |
| | | GGCGGAGGATCTGGACAACCTAAGGCCAATCCTACCGTGACACTGTTCCCT |
| | | CCATCCTCCGAGGAACTGCAGGCCAACAAGGCTACCCTCGTGTGCCTGATC |
| | | TCCGACTTTTACCCTGGCGCTGTGACCGTGGCCTGGAAGGCTGATGGATCT |
| | | CCTGTGAAGGCTGGCGTGGAAACCACCAAGCCTTCCAAGCAGTCCAACAAC |
| | | AAATACGCCGCCTCCTCCTACCTGTCTCTGACCCCTGAACAGTGGAAGTCC |
| | | CACCGGTCCTACAGCTGCCAAGTGACCCATGAGGGCTCCACCGTGGAAAAG |
| | | ACCGTGGCTCCTACCGAGTGCTCC |
| SEQ ID | aCCR2 | ATGGAAACCGACACACTGCTGCTGTGGGTGCTGCTCTTGTGGGTGCCAGGA |
| NO: | Hum1 VH- | TCTACAGGAGAAGTGCAGCTGGTGGAAAGCGGTGGCGGTCTGGTGCAGCCT |
| 321 | hCH1- | GGCGGTTCCCTCCGGCTGTCATGTGCTGCCTCCGGATTCTCGTTCAACGCG |
| | hFc_Knob- | TATGCCATGAACTGGGTGAGGCAGGCCCCGGGAAAGGGACTGGAATGGGTG |
| | 3 x 4GS- | GGGAGAATCCGGACCAAGAACAATAACTACGCTACTTACTACGCCGACTCC |
| | BI117 VH- | GTCAAGGACCGGTTCACAATTTCCCGGGACGACAGCAAGAGCTCACTGTAC |
| | 3 x 4GS- | CTTCAGATGAACAGCCTCAAAACCGAGGACACCGCCGTGTACTACTGTGCC |
| | aCSF1R | ACCTTTTACGGCAACGGTGTGTGGGGACAGGGAACAACTGTCACCGTGTCC |
| | BI117 VL | TCCGCTTCTACCAAGGGACCCAGCGTGTTCCCTCTGGCTCCTTCCAGCAAG |
| | | TCTACCTCTGGCGGAACAGCTGCTCTGGGCTGCCTGGTCAAGGACTACTTT |
| | | CCTGAGCCTGTGACCGTGTCTTGGAACTCTGGCGCTCTGACATCCGGCGTG |
| | | CACACATTTCCAGCTGTGCTGCAGTCCTCCGGCCTGTACTCTCTGTCCTCT |
| | | GTCGTGACCGTGCCTTCCAGCTCTCTGGGAACCCAGACCTACATCTGCAAT |
| | | GTGAACCACAAGCCTTCCAACACCAAGGTGGACAAGAGAGTGGAACCCAAG |
| | | TCCTGCGATAAGACCCACACATGTCCTCCATGCCCTGCCCCTGAGCTGCTG |
| | | GGCGGACCTTCCGTGTTCCTGTTCCCTCCAAAGCCCAAGGACACCCTGATG |
| | | ATCAGCCGGACCCCTGAAGTGACCTGCGTGGTGGTGGATGTGTCCCACGAG |
| | | GATCCCGAAGTGAAGTTCAATTGGTACGTGGACGGCGTGGAAGTGCACAAC |
| | | GCCAAGACCAAGCCCAGAGAGGAACAGTACAACAGCACCTACCGGGTGGTG |
| | | TCCGTGCTGACCGTGCTGCATCAGGACTGGCTGAACGGCAAAGAGTACAAG |
| | | TGCAAGGTGTCCAACAAGGCCCTGCCTGCCCCTATCGAGAAAACCATCAGC |
| | | AAGGCCAAGGGCCAGCCCCGCGAACCTCAGGTGTACACACTGCCTCCCTGC |
| | | CGGGAAGAGATGACCAAGAACCAGGTGTCCCTGTGGTGCCTGGTCAAGGGC |
| | | TTCTACCCCTCCGATATCGCCGTGGAATGGGAGAGCAACGGCCAGCCCGAG |
| | | AACAACTACAAGACCACCCCTCCCGTGCTGGACAGCGACGGCAGCTTCTTC |
| | | CTGTACTCCAAACTGACCGTGGACAAGAGCCGGTGGCAGCAGGGCAATGTG |
| | | TTCAGCTGTAGCGTGATGCACGAGGCCCTGCACAACCACTACACCCAGAAG |
| | | TCCCTGAGCCTGTCTCCTGGCAAAGGTGGCGGAGGAAGCGGAGGCGGAGGT |
| | | TCTGGCGGCGGAGGATCTGAAGTGCAGCTGGTCGAAAGCGGAGGGGGTCTG |
| | | GTCCAGCCTGGAGGGTCCCTGCGGCTGTCCTGCGCCGCTTCCGGCTTCACC |
| | | TTCTCCAACGATGAAATGAACTGGATCCGCCAAGCCCCTGGAAAGGGCCTG |
| | | GAATGGGTGTCGTACATCTCGAGCAGGTCCAGCACTATCTACTATGCCGAC |
| | | GCGGTGAAGGGACGCTTCACTATCAGCCGCGATAACGCACGCAATTCCCTC |
| | | TACCTGCAGATGAACTCGCTCAGAGCTGAGGATACTGCCGTCTACTACTGC |
| | | GCCCGCGGCGTGGACGGCGATTTTTCCTTCGATTACTGGGGACAGGGCACT |
| | | CTTGTCACCGTGTCAAGCGGTGGCGGAGGAAGCGGAGGCGGAGGTTCTGGC |
| | | GGCGGAGGATCTCAACTGGTGCTGACCCAGCCCCCTTCCGTCTCCGGCGCC |
| | | CCGGGCCAGCGCGTCACTATCTCCTGTACCGGCAGCTCCAGCAACATCGGA |
| | | GCAGGATACGACGTGCACTGGTACCAACAGCTCCCCGGAACCGCGCCTAAG |
| | | CTGCTGATCTACGGGAACTCTAACCGGCCGTCCGGCGTGCCTGACCGCTTC |
| | | AGCGGATCGAAGTCCGGCACCAGCGCCTCCCTGGCCATCACTGGACTGCAG |
| | | GCCGAGGACGAAGCCGATTACTACTGCCAGTCCTACGACTCCTCCCTGTCC |
| | | GAGGAAGTGTTCGGAGGCGGGACGAAGCTCACCGTCCTG |
| SEQ ID | aCCR2 | ATGGAAACCGACACACTGCTGCTGTGGGTGCTGCTCTTGTGGGTGCCAGGA |
| NO: | Hum1 VH- | TCTACAGGAGAAGTGCAGCTGGTGGAAAGCGGTGGCGGTCTGGTGCAGCCT |
| 322 | hCH1- | GGCGGTTCCCTCCGGCTGTCATGTGCTGCCTCCGGATTCTCGTTCAACGCG |
| | hFc_Knob- | TATGCCATGAACTGGGTGAGGCAGGCCCCGGGAAAGGGACTGGAATGGGTG |
| | 3 x 4GS- | GGGAGAATCCGGACCAAGAACAATAACTACGCTACTTACTACGCCGACTCC |
| | BI123 VH- | GTCAAGGACCGGTTCACAATTTCCCGGGACGACAGCAAGAGCTCACTGTAC |
| | 3 x 4GS- | CTTCAGATGAACAGCCTCAAAACCGAGGACACCGCCGTGTACTACTGTGCC |
| | aCSF1R | ACCTTTTACGGCAACGGTGTGTGGGGACAGGGAACAACTGTCACCGTGTCC |
| | BI123 VL | TCCGCTTCTACCAAGGGACCCAGCGTGTTCCCTCTGGCTCCTTCCAGCAAG |
| | | TCTACCTCTGGCGGAACAGCTGCTCTGGGCTGCCTGGTCAAGGACTACTTT |
| | | CCTGAGCCTGTGACCGTGTCTTGGAACTCTGGCGCTCTGACATCCGGCGTG |
| | | CACACATTTCCAGCTGTGCTGCAGTCCTCCGGCCTGTACTCTCTGTCCTCT |
| | | GTCGTGACCGTGCCTTCCAGCTCTCTGGGAACCCAGACCTACATCTGCAAT |
| | | GTGAACCACAAGCCTTCCAACACCAAGGTGGACAAGAGAGTGGAACCCAAG |
| | | TCCTGCGATAAGACCCACACATGTCCTCCATGCCCTGCCCCTGAGCTGCTG |
| | | GGCGGACCTTCCGTGTTCCTGTTCCCTCCAAAGCCCAAGGACACCCTGATG |
| | | ATCAGCCGGACCCCTGAAGTGACCTGCGTGGTGGTGGATGTGTCCCACGAG |
| | | GATCCCGAAGTGAAGTTCAATTGGTACGTGGACGGCGTGGAAGTGCACAAC |
| | | GCCAAGACCAAGCCCAGAGAGGAACAGTACAACAGCACCTACCGGGTGGTG |
| | | TCCGTGCTGACCGTGCTGCATCAGGACTGGCTGAACGGCAAAGAGTACAAG |
| | | TGCAAGGTGTCCAACAAGGCCCTGCCTGCCCCTATCGAGAAAACCATCAGC |
| | | AAGGCCAAGGGCCAGCCCCGCGAACCTCAGGTGTACACACTGCCTCCCTGC |
| | | CGGGAAGAGATGACCAAGAACCAGGTGTCCCTGTGGTGCCTGGTCAAGGGC |
| | | TTCTACCCCTCCGATATCGCCGTGGAATGGGAGAGCAACGGCCAGCCCGAG |
| | | AACAACTACAAGACCACCCCTCCCGTGCTGGACAGCGACGGCAGCTTCTTC |
| | | CTGTACTCCAAACTGACCGTGGACAAGAGCCGGTGGCAGCAGGGCAATGTG |
| | | TTCAGCTGTAGCGTGATGCACGAGGCCCTGCACAACCACTACACCCAGAAG |
| | | TCCCTGAGCCTGTCTCCTGGCAAAGGTGGCGGAGGAAGCGGAGGCGGAGGT |
| | | TCTGGCGGCGGAGGATCTCAGGTGCAGCTTGTGCAAAGCGGGGGAGGCGTG |
| | | GTGCAGCCGGGACGGAGCCTGCGGCTGTCGTGCGCCGCGAGCGGTTTCACC |
| | | TTCTCCTCCTACGCTATGCACTGGGTCCGCCAGGCGCCGGGCAAGGGCCTC |
| | | GAATGGGTGGCCGTGATCAGCTACGATGGCTCCAACAAGTACTACGCCGAC |
| | | TCAGTGAAGGGAAGGTTCACCATCTCAAGAGATAACAGCAAGAACACGCTG |
| | | TACCTCCAGATGAACTCCCTCCGGGCCGAAGACACAGCCGTCTACTACTGT |
| | | GCGAGAGAGCTCGATTACGGCGATTACGGCCTGGACGTGTGGGGCAAGGGA |
| | | ACCACGGTGACCGTCTCCTCCGGTGGCGGAGGAAGCGGAGGCGGAGGTTCT |
| | | GGCGGCGGAGGATCTTCCCTCGTGCTGACCCAACCTCCTTCAGTCTCCGTG |
| | | GCCCCCGGCAAGACCGCCCGCATCACCTGTGGCGGTAACAACATCGGCTCC |
| | | AAGTCAGTCCACTGGTACCAGCAGAAGCCGGGCCAAGCTCCCGTGCTGGTC |
| | | GTGTACGACGACTCAGACCGCCCCAGCGGTATCCCTGAGAGATTTAGCGGA |
| | | TCCAACTCCGGGAACACCGCTACCCTGACCATCTCAAGGGTGGAGGCCGGA |
| | | GACGAAGCCGACTACTACTGCCAGGTGTGGGATTCCAGCTCCGACCACGTG |
| | | GTGTTCGGCGGCGGCACTCAGCTCACCGTGCTG |
| SEQ ID | hFc_Knob | ATGGAAACCGACACACTGCTGCTGTGGGTGCTGCTCTTGTGGGTGCCAGGA |
| NO: | (H435R, | TCTACAGGAGACAAGACCCATACCTGTCCTCCATGTCCTGCTCCAGAGCTG |
| 397 | Y436F) | CTCGGAGGCCCTTCCGTGTTTCTGTTCCCTCCAAAGCCTAAGGACACCCTG |
| | | ATGATCTCTCGGACCCCTGAAGTGACCTGCGTGGTGGTGGATGTGTCTCAC |
| | | GAGGATCCCGAAGTGAAGTTCAATTGGTACGTGGACGGCGTGGAAGTGCAC |
| | | AACGCCAAGACCAAGCCTAGAGAGGAACAGTACAACTCCACCTACAGAGTG |
| | | GTGTCCGTGCTGACCGTGCTGCACCAGGATTGGCTGAACGGCAAAGAGTAC |
| | | AAGTGCAAGGTGTCCAACAAGGCCCTGCCTGCTCCTATCGAAAAGACCATC |
| | | TCCAAGGCCAAGGGCCAGCCTAGGGAACCCCAGGTTTACACCCTGCCTCCA |
| | | TGCCGGGAAGAGATGACCAAGAACCAGGTGTCCCTGTGGTGCCTGGTCAAG |
| | | GGCTTCTACCCTTCCGATATCGCCGTGGAATGGGAGAGCAATGGCCAGCCT |
| | | GAGAACAACTACAAGACCACACCTCCTGTGCTGGACTCCGACGGCTCATTC |
| | | TTCCTGTACTCCAAGCTGACAGTGGACAAGTCCAGATGGCAGCAGGGCAAC |
| | | GTGTTCTCCTGCTCCGTGATGCACGAGGCCCTGCACAACAGATTCACCCAG |
| | | AAGTCCCTGTCTCTGTCCCCTGGAAAAGGCGGCGGAGGATCTGGCGGAGGC |
| | | GGATCTCACCATCACCATCATCACCACCAC |
| SEQ ID | hTGFbR2 | ATGGGCCGCGGACTTCTGCGCGGGCTGTGGCCTCTGCACATCGTGCTGTGG |
| NO: | signal | ACCCGCATCGCGTCCACT |
| 275 | peptide | |
| SEQ ID | hTGFbR2 | ATTCCTCCACACGTGCAAAAGTCGGTGAACAATGATATGATCGTCACCGAC |
| NO: | | AACAACGGAGCCGTGAAGTTTCCTCAGCTGTGCAAGTTTTGTGATGTCCGC |
| 276 | | TTCAGCACCTGTGACAACCAGAAGTCATGCATGTCGAACTGTTCGATCACC |
| | | AGCATTTGCGAAAAGCCTCAAGAGGTGTGCGTGGCCGTGTGGCGCAAGAAC |
| | | GACGAAAACATCACTCTGGAAACCGTGTGCCATGATCCTAAGCTCCCGTAC |
| | | CATGACTTCATTCTTGAAGATGCAGCCTCCCCCAAGTGCATCATGAAGGAG |
| | | AAGAAGAAGCCTGGCGAAACCTTCTTCATGTGCTCATGCAGCTCCGACGAA |
| | | TGTAACGACAACATCATCTTCTCAGAGGAATACAACACCTCAAACCCGGAC |
| SEQ ID | IL2 | GCCCCTACCAGCAGCAGCACCAAGAAAACCCAGCTCCAGCTCGAGCACCTC |
| NO: | | CTGCTGGACCTGCAGATGATCCTGAACGGCATCAACAACTACAAGAACCCC |
| 277 | | AAGCTGACCCGGATGCTGACCTTCAAGTTCTACATGCCCAAGAAGGCCACC |
| | | GAGCTGAAGCACCTCCAGTGCCTGGAAGAGGAACTGAAGCCCCTGGAAGAA |
| | | GTGCTGAACCTGGCCCAGAGCAAGAACTTCCACCTGAGGCCCAGGGACCTG |
| | | ATCAGCAACATCAACGTGATCGTGCTGGAACTGAAAGGCAGCGAGACAACC |
| | | TTCATGTGCGAGTACGCCGACGAGACAGCCACCATCGTGGAATTTCTGAAC |
| | | CGGTGGATCACCTTCTGCCAGAGCATCATCAGCACCCTGACA |
| SEQ ID | 3 × 4GS | GGTGGCGGAGGAAGCGGAGGCGGAGGTTCTGGCGGCGGAGGATCT |
| NO: | linker | |
| 278 | | |
| SEQ ID | 4GS linker | GGTGGCGGAGGAAGC |
| NO: | | |
| 279 | | |
| SEQ ID | 2 × 4GS | GGCGGCGGAGGATCTGGCGGAGGCGGATCT |
| NO: | linker | |
| 394 | | |
| SEQ ID | hFc_Knob | GACAAGACCCATACCTGTCCTCCATGTCCTGCTCCAGAGCTGCTCGGAGGC |
| NO: | (H435R, | CCTTCCGTGTTTCTGTTCCCTCCAAAGCCTAAGGACACCCTGATGATCTCT |
| 395 | Y436F) | CGGACCCCTGAAGTGACCTGCGTGGTGGTGGATGTGTCTCACGAGGATCCC |
| | | GAAGTGAAGTTCAATTGGTACGTGGACGGCGTGGAAGTGCACAACGCCAAG |
| | | ACCAAGCCTAGAGAGGAACAGTACAACTCCACCTACAGAGTGGTGTCCGTG |
| | | CTGACCGTGCTGCACCAGGATTGGCTGAACGGCAAAGAGTACAAGTGCAAG |
| | | GTGTCCAACAAGGCCCTGCCTGCTCCTATCGAAAAGACCATCTCCAAGGCC |
| | | AAGGGCCAGCCTAGGGAACCCCAGGTTTACACCCTGCCTCCATGCCGGGAA |
| | | GAGATGACCAAGAACCAGGTGTCCCTGTGGTGCCTGGTCAAGGGCTTCTAC |
| | | CCTTCCGATATCGCCGTGGAATGGGAGAGCAATGGCCAGCCTGAGAACAAC |
| | | TACAAGACCACACCTCCTGTGCTGGACTCCGACGGCTCATTCTTCCTGTAC |
| | | TCCAAGCTGACAGTGGACAAGTCCAGATGGCAGCAGGGCAACGTGTTCTCC |
| | | TGCTCCGTGATGCACGAGGCCCTGCACAACAGATTCACCCAGAAGTCCCTG |
| | | TCTCTGTCCCCTGGAAAA |
| SEQ ID | 8 × His | CACCATCACCATCATCACCACCAC |
| NO: | | |
| 396 | | |

TABLE 26
Components of full-length heavy chain and light chain sequences.

| Full | | | | | | | | | | |
|---|---|---|---|---|---|---|---|---|---|---|
| length | Variable | Linker | Variable | Linker | Constant | Fc | Linker | Variable | Linker | Variable |
| SEQ ID | SEQ ID | | | | SEQ ID | SEQ ID | | | | |
| NO: 71 | NO: 44 | | | | NO: 46 | NO: 52 | | | | |
| SEQ ID | SEQ ID | | | | SEQ ID | | | | | |
| NO: 72 | NO: 45 | | | | NO: 47 | | | | | |
| SEQ ID | SEQ ID | | | | SEQ ID | SEQ ID | | | | |
| NO: 73 | NO: 48 | | | | NO: 49 | NO: 53 | | | | |
| SEQ ID | SEQ ID | | | | SEQ ID | | | | | |
| NO: 74 | NO: 50 | | | | NO: 51 | | | | | |
| SEQ ID | SEQ ID | | | | SEQ ID | SEQ ID | | | | |
| NO: 75 | NO: 54 | | | | NO: 55 | NO: 56 | | | | |
| SEQ ID | SEQ ID | | | | SEQ ID | | | | | |
| NO: 76 | NO: 57 | | | | NO: 58 | | | | | |
| SEQ ID | SEQ ID | | | | SEQ ID | SEQ ID | | | | |
| NO: 77 | NO: 59 | | | | NO: 55 | NO: 56 | | | | |
| SEQ ID | SEQ ID | | | | SEQ ID | | | | | |
| NO: 78 | NO: 60 | | | | NO: 61 | | | | | |
| SEQ ID | SEQ ID | | | | SEQ ID | SEQ ID | | | | |
| NO: 79 | NO: 62 | | | | NO: 55 | NO: 56 | | | | |
| SEQ ID | SEQ ID | | | | SEQ ID | | | | | |
| NO: 80 | NO: 63 | | | | NO: 58 | | | | | |
| SEQ ID | SEQ ID | | | | SEQ ID | SEQ ID | | | | |
| NO: 81 | NO: 64 | | | | NO: 55 | NO: 56 | | | | |
| SEQ ID | SEQ ID | | | | SEQ ID | | | | | |
| NO: 82 | NO: 65 | | | | NO: 58 | | | | | |
| SEQ ID | SEQ ID | | | | SEQ ID | SEQ ID | | | | |
| NO: 83 | NO: 66 | | | | NO: 55 | NO: 68 | | | | |
| SEQ ID | SEQ ID | | | | SEQ ID | | | | | |
| NO: 84 | NO: 67 | | | | NO: 58 | | | | | |
| SEQ ID | SEQ ID | | | | SEQ ID | SEQ ID | | | | |
| NO: 85 | NO: 69 | | | | NO: 55 | NO: 68 | | | | |
| SEQ ID | SEQ ID | | | | SEQ ID | | | | | |
| NO: 86 | NO: 70 | | | | NO: 58 | | | | | |
| SEQ ID | SEQ ID | | | | SEQ ID | SEQ ID | | | | |
| NO: 351 | NO: 323 | | | | NO: 55 | NO: 68 | | | | |
| SEQ ID | SEQ ID | | | | SEQ ID | SEQ ID | | | | |
| NO: 352 | NO: 324 | | | | NO: 55 | NO: 68 | | | | |
| SEQ ID | SEQ ID | | | | SEQ ID | SEQ ID | | | | |
| NO: 353 | NO: 325 | | | | NO: 55 | NO: 68 | | | | |
| SEQ ID | SEQ ID | | | | SEQ ID | SEQ ID | | | | |
| NO: 354 | NO: 326 | | | | NO: 55 | NO: 68 | | | | |
| SEQ ID | SEQ ID | | | | SEQ ID | SEQ ID | | | | |
| NO: 355 | NO: 327 | | | | NO: 55 | NO: 68 | | | | |
| SEQ ID | SEQ ID | | | | SEQ ID | SEQ ID | | | | |
| NO: 356 | NO: 328 | | | | NO: 55 | NO: 68 | | | | |
| SEQ ID | SEQ ID | | | | SEQ ID | SEQ ID | | | | |
| NO: 357 | NO: 329 | | | | NO: 55 | NO: 68 | | | | |
| SEQ ID | SEQ ID | | | | SEQ ID | SEQ ID | | | | |
| NO: 358 | NO: 330 | | | | NO: 55 | NO: 68 | | | | |
| SEQ ID | SEQ ID | | | | SEQ ID | SEQ ID | | | | |
| NO: 359 | NO: 331 | | | | NO: 55 | NO: 68 | | | | |
| SEQ ID | SEQ ID | | | | SEQ ID | SEQ ID | | | | |
| NO: 360 | NO: 332 | | | | NO: 55 | NO: 68 | | | | |
| SEQ ID | SEQ ID | | | | SEQ ID | SEQ ID | | | | |
| NO: 361 | NO: 333 | | | | NO: 55 | NO: 68 | | | | |
| SEQ ID | SEQ ID | | | | SEQ ID | SEQ ID | | | | |
| NO: 362 | NO: 334 | | | | NO: 55 | NO: 68 | | | | |
| SEQ ID | SEQ ID | | | | SEQ ID | SEQ ID | | | | |
| NO: 363 | NO: 335 | | | | NO: 55 | NO: 68 | | | | |
| SEQ ID | SEQ ID | | | | SEQ ID | SEQ ID | | | | |
| NO: 364 | NO: 336 | | | | NO: 55 | NO: 68 | | | | |
| SEQ ID | SEQ ID | | | | SEQ ID | SEQ ID | | | | |
| NO: 365 | NO: 337 | | | | NO: 55 | NO: 68 | | | | |
| SEQ ID | SEQ ID | | | | SEQ ID | SEQ ID | | | | |
| NO: 366 | NO: 338 | | | | NO: 55 | NO: 68 | | | | |
| SEQ ID | SEQ ID | | | | SEQ ID | SEQ ID | | | | |
| NO: 367 | NO: 339 | | | | NO: 55 | NO: 68 | | | | |
| SEQ ID | SEQ ID | | | | SEQ ID | SEQ ID | | | | |
| NO: 368 | NO: 340 | | | | NO: 55 | NO: 68 | | | | |
| SEQ ID | SEQ ID | | | | SEQ ID | | | | | |
| NO: 369 | NO: 341 | | | | NO: 61 | | | | | |
| SEQ ID | SEQ ID | | | | SEQ ID | | | | | |
| NO: 370 | NO: 342 | | | | NO: 61 | | | | | |
| SEQ ID | SEQ ID | | | | SEQ ID | SEQ ID | | | | |
| NO: 371 | NO: 343 | | | | NO: 55 | NO: 56 | | | | |
| SEQ ID | SEQ ID | | | | SEQ ID | SEQ ID | | | | |
| NO: 372 | NO: 344 | | | | NO: 55 | NO: 56 | | | | |
| SEQ ID | SEQ ID | | | | SEQ ID | | | | | |
| NO: 373 | NO: 345 | | | | NO: 58 | | | | | |
| SEQ ID | SEQ ID | | | | SEQ ID | SEQ ID | SEQ ID | SEQ ID | SEQ ID | SEQ ID |
| NO: 374 | NO: 323 | | | | NO: 55 | NO: 68 | NO: 349 | NO: 346 | NO: 349 | NO: 347 |
| SEQ ID | SEQ ID | | | | SEQ ID | SEQ ID | SEQ ID | SEQ ID | SEQ ID | SEQ ID |
| NO: 375 | NO: 337 | | | | NO: 55 | NO: 68 | NO: 349 | NO: 346 | NO: 349 | NO: 347 |
| SEQ ID | SEQ ID | | | | SEQ ID | SEQ ID | SEQ ID | SEQ ID | SEQ ID | SEQ ID |
| NO: 376 | NO: 343 | | | | NO: 55 | NO: 56 | NO: 349 | NO: 346 | NO: 349 | NO: 347 |
| SEQ ID | SEQ ID | | | | SEQ ID | | SEQ ID | SEQ ID | | |
| NO: 377 | NO: 341 | | | | NO: 61 | | NO: 349 | NO: 246 | | |
| SEQ ID | SEQ ID | | | | SEQ ID | | | SEQ ID | | |
| NO: 378 | NO: 341 | | | | NO: 61 | | | NO: 246 | | |
| SEQ ID | SEQ ID | | | | SEQ ID | | SEQ ID | SEQ ID | | |
| NO: 379 | NO: 342 | | | | NO: 61 | | NO: 349 | NO: 246 | | |
| SEQ ID | SEQ ID | | | | SEQ ID | | | SEQ ID | | |
| NO: 380 | NO: 342 | | | | NO: 61 | | | NO: 246 | | |
| SEQ ID | SEQ ID | | | | SEQ ID | | SEQ ID | SEQ ID | | |
| NO: 381 | NO: 345 | | | | NO: 58 | | NO: 349 | NO: 246 | | |
| SEQ ID | SEQ ID | | | | SEQ ID | | | SEQ ID | | |
| NO: 382 | NO: 345 | | | | NO: 58 | | | NO: 246 | | |
| SEQ ID | SEQ ID | | | | SEQ ID | SEQ ID | SEQ ID | SEQ ID | | |
| NO: 383 | NO: 323 | | | | NO: 55 | NO: 68 | NO: 349 | NO: 101 | | |
| SEQ ID | SEQ ID | | | | SEQ ID | SEQ ID | SEQ ID | SEQ ID | | |
| NO: 384 | NO: 337 | | | | NO: 55 | NO: 68 | NO: 349 | NO: 101 | | |
| SEQ ID | SEQ ID | | | | SEQ ID | SEQ ID | SEQ ID | SEQ ID | | |
| NO: 385 | NO: 343 | | | | NO: 55 | NO: 56 | NO: 349 | NO: 101 | | |
| SEQ ID | SEQ ID | SEQ ID | SEQ ID | SEQ ID | | SEQ ID | | | | |
| NO: 386 | NO: 323 | NO: 349 | NO: 341 | NO: 350 | | NO: 68 | | | | |
| SEQ ID | SEQ ID | SEQ ID | SEQ ID | SEQ ID | | SEQ ID | | | | |
| NO: 387 | NO: 337 | NO: 349 | NO: 342 | NO: 350 | | NO: 68 | | | | |
| SEQ ID | SEQ ID | SEQ ID | SEQ ID | SEQ ID | | SEQ ID | SEQ ID | SEQ ID | | |
| NO: 388 | NO: 323 | NO: 349 | NO: 341 | NO: 350 | | NO: 68 | NO: 349 | NO: 101 | | |
| SEQ ID | SEQ ID | SEQ ID | SEQ ID | SEQ ID | | SEQ ID | SEQ ID | SEQ ID | | |
| NO: 389 | NO: 337 | NO: 349 | NO: 342 | NO: 350 | | NO: 68 | NO: 349 | NO: 101 | | |
| SEQ ID | SEQ ID | SEQ ID | | | SEQ ID | SEQ ID | | | | |
| NO: 390 | NO: 101 | NO: 349 | | | NO: 55 | NO: 68 | | | | |
| SEQ ID | SEQ ID | SEQ ID | | | SEQ ID | | | | | |
| NO: 391 | NO: 101 | NO: 349 | | | NO: 61 | | | | | |
| SEQ ID | SEQ ID | | | | SEQ ID | SEQ ID | SEQ ID | SEQ ID | SEQ ID | SEQ ID |
| NO: 392 | NO: 343 | | | | NO: 55 | NO: 56 | NO: 349 | NO: 323 | NO: 349 | NO: 341 |
| SEQ ID | SEQ ID | | | | SEQ ID | SEQ ID | SEQ ID | SEQ ID | SEQ ID | SEQ ID |
| NO: 393 | NO: 344 | | | | NO: 55 | NO: 56 | NO: 349 | NO: 337 | NO: 349 | NO: 342 |
| SEQ ID | | | | | | SEQ ID | SEQ ID | SEQ ID | | |
| NO: 401 | | | | | | NO: 399 | NO: 398 | NO: 400 | | |

TABLE 27
Sequences used to construct ORFs.

| Full | | | | | | | | | | |
|---|---|---|---|---|---|---|---|---|---|---|
| length | Variable | Linker | Variable | Linker | Constant | Fc | Linker | Variable | Linker | Variable |
| SEQ ID | SEQ ID | | | | SEQ ID | SEQ ID | | | | |
| NO: 28 | NO: 1 | | | | NO: 3 | NO: 9 | | | | |
| SEQ ID | SEQ ID | | | | SEQ ID | | | | | |
| NO: 29 | NO: 2 | | | | NO: 4 | | | | | |
| SEQ ID | SEQ ID | | | | SEQ ID | SEQ ID | | | | |
| NO: 30 | NO: 5 | | | | NO: 6 | NO: 10 | | | | |
| SEQ ID | SEQ ID | | | | SEQ ID | | | | | |
| NO: 31 | NO: 7 | | | | NO: 8 | | | | | |
| SEQ ID | SEQ ID | | | | SEQ ID | SEQ ID | | | | |
| NO: 32 | NO: 11 | | | | NO: 12 | NO: 13 | | | | |
| SEQ ID | SEQ ID | | | | SEQ ID | | | | | |
| NO: 33 | NO: 14 | | | | NO: 15 | | | | | |
| SEQ ID | SEQ ID | | | | SEQ ID | SEQ ID | | | | |
| NO: 34 | NO: 16 | | | | NO: 12 | NO: 13 | | | | |
| SEQ ID | SEQ ID | | | | SEQ ID | | | | | |
| NO: 35 | NO: 17 | | | | NO: 18 | | | | | |
| SEQ ID | SEQ ID | | | | SEQ ID | SEQ ID | | | | |
| NO: 36 | NO: 19 | | | | NO: 12 | NO: 13 | | | | |
| SEQ ID | SEQ ID | | | | SEQ ID | | | | | |
| NO: 37 | NO: 20 | | | | NO: 15 | | | | | |
| SEQ ID | SEQ ID | | | | SEQ ID | SEQ ID | | | | |
| NO: 38 | NO: 21 | | | | NO: 12 | NO: 13 | | | | |
| SEQ ID | SEQ ID | | | | SEQ ID | | | | | |
| NO: 39 | NO: 22 | | | | NO: 18 | | | | | |
| SEQ ID | SEQ ID | | | | SEQ ID | SEQ ID | | | | |
| NO: 40 | NO: 23 | | | | NO: 12 | NO: 25 | | | | |
| SEQ ID | SEQ ID | | | | SEQ ID | | | | | |
| NO: 41 | NO: 24 | | | | NO: 15 | | | | | |
| SEQ ID | SEQ ID | | | | SEQ ID | SEQ ID | | | | |
| NO: 42 | NO: 26 | | | | NO: 12 | NO: 25 | | | | |
| SEQ ID | SEQ ID | | | | SEQ ID | | | | | |
| NO: 43 | NO: 27 | | | | NO: 15 | | | | | |
| SEQ ID | SEQ ID | | | | SEQ ID | SEQ ID | | | | |
| NO: 280 | NO: 250 | | | | NO: 12 | NO: 25 | | | | |
| SEQ ID | SEQ ID | | | | SEQ ID | SEQ ID | | | | |
| NO: 281 | NO: 251 | | | | NO: 12 | NO: 25 | | | | |
| SEQ ID | SEQ ID | | | | SEQ ID | SEQ ID | | | | |
| NO: 282 | NO: 252 | | | | NO: 12 | NO: 25 | | | | |
| SEQ ID | SEQ ID | | | | SEQ ID | SEQ ID | | | | |
| NO: 283 | NO: 253 | | | | NO: 12 | NO: 25 | | | | |
| SEQ ID | SEQ ID | | | | SEQ ID | SEQ ID | | | | |
| NO: 284 | NO: 254 | | | | NO: 12 | NO: 25 | | | | |
| SEQ ID | SEQ ID | | | | SEQ ID | SEQ ID | | | | |
| NO: 285 | NO: 255 | | | | NO: 12 | NO: 25 | | | | |
| SEQ ID | SEQ ID | | | | SEQ ID | SEQ ID | | | | |
| NO: 286 | NO: 256 | | | | NO: 12 | NO: 25 | | | | |
| SEQ ID | SEQ ID | | | | SEQ ID | SEQ ID | | | | |
| NO: 287 | NO: 257 | | | | NO: 12 | NO: 25 | | | | |
| SEQ ID | SEQ ID | | | | SEQ ID | SEQ ID | | | | |
| NO: 288 | NO: 258 | | | | NO: 12 | NO: 25 | | | | |
| SEQ ID | SEQ ID | | | | SEQ ID | SEQ ID | | | | |
| NO: 289 | NO: 259 | | | | NO: 12 | NO: 25 | | | | |
| SEQ ID | SEQ ID | | | | SEQ ID | SEQ ID | | | | |
| NO: 290 | NO: 260 | | | | NO: 12 | NO: 25 | | | | |
| SEQ ID | SEQ ID | | | | SEQ ID | SEQ ID | | | | |
| NO: 291 | NO: 261 | | | | NO: 12 | NO: 25 | | | | |
| SEQ ID | SEQ ID | | | | SEQ ID | SEQ ID | | | | |
| NO: 292 | NO: 262 | | | | NO: 12 | NO: 25 | | | | |
| SEQ ID | SEQ ID | | | | SEQ ID | SEQ ID | | | | |
| NO: 293 | NO: 263 | | | | NO: 12 | NO: 25 | | | | |
| SEQ ID | SEQ ID | | | | SEQ ID | SEQ ID | | | | |
| NO: 294 | NO: 264 | | | | NO: 12 | NO: 25 | | | | |
| SEQ ID | SEQ ID | | | | SEQ ID | SEQ ID | | | | |
| NO: 295 | NO: 265 | | | | NO: 12 | NO: 25 | | | | |
| SEQ ID | SEQ ID | | | | SEQ ID | SEQ ID | | | | |
| NO: 296 | NO: 266 | | | | NO: 12 | NO: 25 | | | | |
| SEQ ID | SEQ ID | | | | SEQ ID | SEQ ID | | | | |
| NO: 297 | NO: 267 | | | | NO: 12 | NO: 25 | | | | |
| SEQ ID | SEQ ID | | | | SEQ ID | | | | | |
| NO: 298 | NO: 268 | | | | NO: 18 | | | | | |
| SEQ ID | SEQ ID | | | | SEQ ID | | | | | |
| NO: 299 | NO: 269 | | | | NO: 18 | | | | | |
| SEQ ID | SEQ ID | | | | SEQ ID | SEQ ID | | | | |
| NO: 300 | NO: 270 | | | | NO: 12 | NO: 13 | | | | |
| SEQ ID | SEQ ID | | | | SEQ ID | SEQ ID | | | | |
| NO: 301 | NO: 271 | | | | NO: 12 | NO: 13 | | | | |
| SEQ ID | SEQ ID | | | | SEQ ID | | | | | |
| NO: 302 | NO: 272 | | | | NO: 15 | | | | | |
| SEQ ID | SEQ ID | | | | SEQ ID | SEQ ID | SEQ ID | SEQ ID | SEQ ID | SEQ ID |
| NO: 303 | NO: 250 | | | | NO: 12 | NO: 25 | NO: 278 | NO: 273 | NO: 278 | NO: 274 |
| SEQ ID | SEQ ID | | | | SEQ ID | SEQ ID | SEQ ID | SEQ ID | SEQ ID | SEQ ID |
| NO: 304 | NO: 264 | | | | NO: 12 | NO: 25 | NO: 278 | NO: 273 | NO: 278 | NO: 274 |
| SEQ ID | SEQ ID | | | | SEQ ID | SEQ ID | SEQ ID | SEQ ID | SEQ ID | SEQ ID |
| NO: 305 | NO: 270 | | | | NO: 12 | NO: 13 | NO: 278 | NO: 273 | NO: 278 | NO: 274 |
| SEQ ID | SEQ ID | | | | SEQ ID | | SEQ ID | SEQ ID | | |
| NO: 306 | NO: 268 | | | | NO: 18 | | NO: 278 | NO: 277 | | |
| SEQ ID | SEQ ID | | | | SEQ ID | | | SEQ ID | | |
| NO: 307 | NO: 268 | | | | NO: 18 | | | NO: 277 | | |
| SEQ ID | SEQ ID | | | | SEQ ID | | SEQ ID | SEQ ID | | |
| NO: 308 | NO: 269 | | | | NO: 18 | | NO: 278 | NO: 277 | | |
| SEQ ID | SEQ ID | | | | SEQ ID | | | SEQ ID | | |
| NO: 309 | NO: 269 | | | | NO: 18 | | | NO: 277 | | |
| SEQ ID | SEQ ID | | | | SEQ ID | | SEQ ID | SEQ ID | | |
| NO: 310 | NO: 272 | | | | NO: 15 | | NO: 278 | NO: 277 | | |
| SEQ ID | SEQ ID | | | | SEQ ID | | | SEQ ID | | |
| NO: 311 | NO: 272 | | | | NO: 15 | | | NO: 277 | | |
| SEQ ID | SEQ ID | | | | SEQ ID | SEQ ID | SEQ ID | SEQ ID | | |
| NO: 312 | NO: 250 | | | | NO: 12 | NO: 25 | NO: 278 | NO: 276 | | |
| SEQ ID | SEQ ID | | | | SEQ ID | SEQ ID | SEQ ID | SEQ ID | | |
| NO: 313 | NO: 264 | | | | NO: 12 | NO: 25 | NO: 278 | NO: 276 | | |
| SEQ ID | SEQ ID | | | | SEQ ID | SEQ ID | SEQ ID | SEQ ID | | |
| NO: 314 | NO: 270 | | | | NO: 12 | NO: 13 | NO: 278 | NO: 276 | | |
| SEQ ID | SEQ ID | SEQ ID | SEQ ID | SEQ ID | | SEQ ID | | | | |
| NO: 315 | NO: 250 | NO: 278 | NO: 268 | NO: 279 | | NO: 25 | | | | |
| SEQ ID | SEQ ID | SEQ ID | SEQ ID | SEQ ID | | SEQ ID | | | | |
| NO: 316 | NO: 264 | NO: 278 | NO: 269 | NO: 279 | | NO: 25 | | | | |
| SEQ ID | SEQ ID | SEQ ID | SEQ ID | SEQ ID | | SEQ ID | SEQ ID | SEQ ID | | |
| NO: 317 | NO: 250 | NO: 278 | NO: 268 | NO: 279 | | NO: 25 | NO: 278 | NO: 276 | | |
| SEQ ID | SEQ ID | SEQ ID | SEQ ID | SEQ ID | | SEQ ID | SEQ ID | SEQ ID | | |
| NO: 318 | NO: 264 | NO: 278 | NO: 269 | NO: 279 | | NO: 25 | NO: 278 | NO: 276 | | |
| SEQ ID | SEQ ID | SEQ ID | | | SEQ ID | SEQ ID | | | | |
| NO: 319 | NO: 276 | NO: 278 | | | NO: 12 | NO: 25 | | | | |
| SEQ ID | SEQ ID | SEQ ID | | | SEQ ID | | | | | |
| NO: 320 | NO: 276 | NO: 278 | | | NO: 18 | | | | | |
| SEQ ID | SEQ ID | | | | SEQ ID | SEQ ID | SEQ ID | SEQ ID | SEQ ID | SEQ ID |
| NO: 321 | NO: 270 | | | | NO: 12 | NO: 13 | NO: 278 | NO: 250 | NO: 278 | NO: 268 |
| SEQ ID | SEQ ID | | | | SEQ ID | SEQ ID | SEQ ID | SEQ ID | SEQ ID | SEQ ID |
| NO: 322 | NO: 270 | | | | NO: 12 | NO: 13 | NO: 278 | NO: 264 | NO: 278 | NO: 269 |
| SEQ ID | | | | | | SEQ ID | SEQ ID | SEQ ID | | |
| NO: 397 | | | | | | NO: 395 | NO: 394 | NO: 396 | | |

TABLE 28
Exemplary multispecific antibody molecules.

| | | | SEQ ID | | SEQ ID | | SEQ ID | | SEQ ID |
|---|---|---|---|---|---|---|---|---|---|
| Multispecific | | | NO of | | NO of | | NO of | | NO of |
| Molecule | BIM ID | HC 1 | HC 1 | LC 1 | LC 1 | HC 2 | HC 2 | LC 2 | LC 2 |
| 10 | BIM0204 | aCCR2 | SEQ ID | aCCR2 | SEQ ID | aCSF1R | SEQ ID | aCSF1R | SEQ ID |
| | | Hum1 VH- | NO: 371 | VL- | NO: 373 | BI117 | NO: 351 | BI117 | NO: 369 |
| | | hCH1- | | hCLIg_vk | | VH-hCH1- | | VL- | |
| | | hFc_Knob | | | | hFc_Hole | | hCLIg_vl | |
| 11 | | aCCR2 | SEQ ID | aCCR2 | SEQ ID | aCSF1R | SEQ ID | aCSF1R | SEQ ID |
| | | Hum1 VH- | NO: 371 | VL- | NO: 373 | BI117 C5- | NO: 352 | BI117 | NO: 369 |
| | | hCH1- | | hCLIg_vk | | R2A VH- | | VL- | |
| | | hFc_Knob | | | | hCH1- | | hCLIg_vl | |
| | | | | | | hFc_Hole | | | |
| 12 | | aCCR2 | SEQ ID | aCCR2 | SEQ ID | aCSF1R | SEQ ID | aCSF1R | SEQ ID |
| | | Hum1 VH- | NO: 371 | VL- | NO: 373 | BI117 C9- | NO: 353 | BI117 | NO: 369 |
| | | hCH1- | | hCLIg_vk | | R2A VH- | | VL- | |
| | | hFc_Knob | | | | hCH1- | | hCLIg_vl | |
| | | | | | | hFc_Hole | | | |
| 13 | | aCCR2 | SEQ ID | aCCR2 | SEQ ID | aCSF1R | SEQ ID | aCSF1R | SEQ ID |
| | | Hum1 VH- | NO: 371 | VL- | NO: 373 | BI117 D1- | NO: 354 | BI117 | NO: 369 |
| | | hCH1- | | hCLIg_vk | | R2A VH- | | VL- | |
| | | hFc_Knob | | | | hCH1- | | hCLIg_vl | |
| | | | | | | hFc_Hole | | | |
| 14 | | aCCR2 | SEQ ID | aCCR2 | SEQ ID | aCSF1R | SEQ ID | aCSF1R | SEQ ID |
| | | Hum1 VH- | NO: 371 | VL- | NO: 373 | BI117 E2- | NO: 355 | BI117 | NO: 369 |
| | | hCH1- | | hCLIg_vk | | R2B VH- | | VL- | |
| | | hFc_Knob | | | | hCH1- | | hCLIg_vl | |
| | | | | | | hFc_Hole | | | |
| 15 | | aCCR2 | SEQ ID | aCCR2 | SEQ ID | aCSF1R | SEQ ID | aCSF1R | SEQ ID |
| | | Hum1 VH- | NO: 371 | VL- | NO: 373 | BI117 G1- | NO: 356 | BI117 | NO: 369 |
| | | hCH1- | | hCLIg_vk | | R2B VH- | | VL- | |
| | | hFc_Knob | | | | hCH1- | | hCLIg_vl | |
| | | | | | | hFc_Hole | | | |
| 16 | | aCCR2 | SEQ ID | aCCR2 | SEQ ID | aCSF1R | SEQ ID | aCSF1R | SEQ ID |
| | | Hum1 VH- | NO: 371 | VL- | NO: 373 | BI117 G12- | NO: 357 | BI117 | NO: 369 |
| | | hCH1- | | hCLIg_vk | | R2B VH- | | VL- | |
| | | hFc_Knob | | | | hCH1- | | hCLIg_vl | |
| | | | | | | hFc_Hole | | | |
| 17 | | aCCR2 | SEQ ID | aCCR2 | SEQ ID | aCSF1R | SEQ ID | aCSF1R | SEQ ID |
| | | Hum1 VH- | NO: 371 | VL- | NO: 373 | BI117 D6- | NO: 358 | BI117 | NO: 369 |
| | | hCH1- | | hCLIg_vk | | R3B VH- | | VL- | |
| | | hFc_Knob | | | | hCH1- | | hCLIg_vl | |
| | | | | | | hFc_Hole | | | |
| 18 | | aCCR2 | SEQ ID | aCCR2 | SEQ ID | aCSF1R | SEQ ID | aCSF1R | SEQ ID |
| | | Hum1 VH- | NO: 371 | VL- | NO: 373 | BI117 A6- | NO: 359 | BI117 | NO: 369 |
| | | hCH1- | | hCLIg_vk | | R3B VH- | | VL- | |
| | | hFc_Knob | | | | hCH1- | | hCLIg_vl | |
| | | | | | | hFc_Hole | | | |
| 19 | | aCCR2 | SEQ ID | aCCR2 | SEQ ID | aCSF1R | SEQ ID | aCSF1R | SEQ ID |
| | | Hum1 VH- | NO: 371 | VL- | NO: 373 | BI117 A11- | NO: 360 | BI117 | NO: 369 |
| | | hCH1- | | hCLIg_vk | | R3B VH- | | VL- | |
| | | hFc_Knob | | | | hCH1- | | hCLIg_vl | |
| | | | | | | hFc_Hole | | | |
| 20 | | aCCR2 | SEQ ID | aCCR2 | SEQ ID | aCSF1R | SEQ ID | aCSF1R | SEQ ID |
| | | Hum1 VH- | NO: 371 | VL- | NO: 373 | BI117 B2- | NO: 361 | BI117 | NO: 369 |
| | | hCH1- | | hCLIg_vk | | R3B VH- | | VL- | |
| | | hFc_Knob | | | | hCH1- | | hCLIg_vl | |
| | | | | | | hFc_Hole | | | |
| 21 | | aCCR2 | SEQ ID | aCCR2 | SEQ ID | aCSF1R | SEQ ID | aCSF1R | SEQ ID |
| | | Hum1 VH- | NO: 371 | VL- | NO: 373 | BI117 C5- | NO: 362 | BI117 | NO: 369 |
| | | hCH1- | | hCLIg_vk | | R3B VH- | | VL- | |
| | | hFc_Knob | | | | hCH1- | | hCLIg_vl | |
| | | | | | | hFc_Hole | | | |
| 22 | | aCCR2 | SEQ ID | aCCR2 | SEQ ID | aCSF1R | SEQ ID | aCSF1R | SEQ ID |
| | | Hum1 VH- | NO: 371 | VL- | NO: 373 | BI117 C6- | NO: 363 | BI117 | NO: 369 |
| | | hCH1- | | hCLIg_vk | | R3B VH- | | VL- | |
| | | hFc_Knob | | | | hCH1- | | hCLIg_vl | |
| | | | | | | hFc_Hole | | | |
| 23 | | aCCR2 | SEQ ID | aCCR2 | SEQ ID | aCSF1R | SEQ ID | aCSF1R | SEQ ID |
| | | Hum1 VH- | NO: 371 | VL- | NO: 373 | BI117 D11- | NO: 364 | BI117 | NO: 369 |
| | | hCH1- | | hCLIg_vk | | R3B VH- | | VL- | |
| | | hFc_Knob | | | | hCH1- | | hCLIg_vl | |
| | | | | | | hFc_Hole | | | |
| 24 | BIM0205 | aCCR2 | SEQ ID | aCCR2 | SEQ ID | aCSF1R | SEQ ID | aCSF1R | SEQ ID |
| | | Hum1 VH- | NO: 371 | VL- | NO: 373 | BI123 | NO: 365 | BI123 | NO: 370 |
| | | hCH1- | | hCLIg_vk | | VH-hCH1- | | VL- | |
| | | hFc_Knob | | | | hFc_Hole | | hCLIg_vl | |
| 25 | | aCCR2 | SEQ ID | aCCR2 | SEQ ID | aCSF1R | SEQ ID | aCSF1R | SEQ ID |
| | | Hum1 VH- | NO: 371 | VL- | NO: 373 | BI123 A5- | NO: 366 | BI123 | NO: 370 |
| | | hCH1- | | hCLIg_vk | | R3B VH- | | VL- | |
| | | hFc_Knob | | | | hCH1- | | hCLIg_vl | |
| | | | | | | hFc_Hole | | | |
| 26 | | aCCR2 | SEQ ID | aCCR2 | SEQ ID | aCSF1R | SEQ ID | aCSF1R | SEQ ID |
| | | Hum1 VH- | NO: 371 | VL- | NO: 373 | BI123 B6- | NO: 367 | BI123 | NO: 370 |
| | | hCH1- | | hCLIg_vk | | R3B VH- | | VL- | |
| | | hFc_Knob | | | | hCH1- | | hCLIg_vl | |
| | | | | | | hFc_Hole | | | |
| 27 | | aCCR2 | SEQ ID | aCCR2 | SEQ ID | aCSF1R | SEQ ID | aCSF1R | SEQ ID |
| | | Hum1 VH- | NO: 371 | VL- | NO: 373 | BI123 C1- | NO: 368 | BI123 | NO: 370 |
| | | hCH1- | | hCLIg_vk | | R3B VH- | | VL- | |
| | | hFc_Knob | | | | hCH1- | | hCLIg_vl | |
| | | | | | | hFc_Hole | | | |
| 28 | BIM0206 | aCCR2 | SEQ ID | aCCR2 | SEQ ID | aCSF1R | SEQ ID | aCSF1R | SEQ ID |
| | | Hum2 VH- | NO: 372 | VL- | NO: 373 | BI117 | NO: 351 | BI117 | NO: 369 |
| | | hCH1- | | hCLIg_vk | | VH-hCH1- | | VL- | |
| | | hFc_Knob | | | | hFc_Hole | | hCLIg_vl | |
| 29 | | aCCR2 | SEQ ID | aCCR2 | SEQ ID | aCSF1R | SEQ ID | aCSF1R | SEQ ID |
| | | Hum2 VH- | NO: 372 | VL- | NO: 373 | BI117 C5- | NO: 352 | BI117 | NO: 369 |
| | | hCH1- | | hCLIg_vk | | R2A VH- | | VL- | |
| | | hFc_Knob | | | | hCH1- | | hCLIg_vl | |
| | | | | | | hFc_Hole | | | |
| 30 | | aCCR2 | SEQ ID | aCCR2 | SEQ ID | aCSF1R | SEQ ID | aCSF1R | SEQ ID |
| | | Hum2 VH- | NO: 372 | VL- | NO: 373 | BI117 C9- | NO: 353 | BI117 | NO: 369 |
| | | hCH1- | | hCLIg_vk | | R2A VH- | | VL- | |
| | | hFc_Knob | | | | hCH1- | | hCLIg_vl | |
| | | | | | | hFc_Hole | | | |
| 31 | | aCCR2 | SEQ ID | aCCR2 | SEQ ID | aCSF1R | SEQ ID | aCSF1R | SEQ ID |
| | | Hum2 VH- | NO: 372 | VL- | NO: 373 | BI117 D1- | NO: 354 | BI117 | NO: 369 |
| | | hCH1- | | hCLIg_vk | | R2A VH- | | VL- | |
| | | hFc_Knob | | | | hCH1- | | hCLIg_vl | |
| | | | | | | hFc_Hole | | | |
| 32 | | aCCR2 | SEQ ID | aCCR2 | SEQ ID | aCSF1R | SEQ ID | aCSF1R | SEQ ID |
| | | Hum2 VH- | NO: 372 | VL- | NO: 373 | BI117 E2- | NO: 355 | BI117 | NO: 369 |
| | | hCH1- | | hCLIg_vk | | R2B VH- | | VL- | |
| | | hFc_Knob | | | | hCH1- | | hCLIg_vl | |
| | | | | | | hFc_Hole | | | |
| 33 | | aCCR2 | SEQ ID | aCCR2 | SEQ ID | aCSF1R | SEQ ID | aCSF1R | SEQ ID |
| | | Hum2 VH- | NO: 372 | VL- | NO: 373 | BI117 G1- | NO: 356 | BI117 | NO: 369 |
| | | hCH1- | | hCLIg_vk | | R2B VH- | | VL- | |
| | | hFc_Knob | | | | hCH1- | | hCLIg_vl | |
| | | | | | | hFc_Hole | | | |
| 34 | | aCCR2 | SEQ ID | aCCR2 | SEQ ID | aCSF1R | SEQ ID | aCSF1R | SEQ ID |
| | | Hum2 VH- | NO: 372 | VL- | NO: 373 | BI117 G12- | NO: 357 | BI117 | NO: 369 |
| | | hCH1- | | hCLIg_vk | | R2B VH- | | VL- | |
| | | hFc_Knob | | | | hCH1- | | hCLIg_vl | |
| | | | | | | hFc_Hole | | | |
| 35 | | aCCR2 | SEQ ID | aCCR2 | SEQ ID | aCSF1R | SEQ ID | aCSF1R | SEQ ID |
| | | Hum2 VH- | NO: 372 | VL- | NO: 373 | BI117 D6- | NO: 358 | BI117 | NO: 369 |
| | | hCH1- | | hCLIg_vk | | R3B VH- | | VL- | |
| | | hFc_Knob | | | | hCH1- | | hCLIg_vl | |
| | | | | | | hFc_Hole | | | |
| 36 | | aCCR2 | SEQ ID | aCCR2 | SEQ ID | aCSF1R | SEQ ID | aCSF1R | SEQ ID |
| | | Hum2 VH- | NO: 372 | VL- | NO: 373 | BI117 A6- | NO: 359 | BI117 | NO: 369 |
| | | hCH1- | | hCLIg_vk | | R3B VH- | | VL- | |
| | | hFc_Knob | | | | hCH1- | | hCLIg_vl | |
| | | | | | | hFc_Hole | | | |
| 37 | | aCCR2 | SEQ ID | aCCR2 | SEQ ID | aCSF1R | SEQ ID | aCSF1R | SEQ ID |
| | | Hum2 VH- | NO: 372 | VL- | NO: 373 | BI117 A11- | NO: 360 | BI117 | NO: 369 |
| | | hCH1- | | hCLIg_vk | | R3B VH- | | VL- | |
| | | hFc_Knob | | | | hCH1- | | hCLIg_vl | |
| | | | | | | hFc_Hole | | | |
| 38 | | aCCR2 | SEQ ID | aCCR2 | SEQ ID | aCSF1R | SEQ ID | aCSF1R | SEQ ID |
| | | Hum2 VH- | NO: 372 | VL- | NO: 373 | BI117 B2- | NO: 361 | BI117 | NO: 369 |
| | | hCH1- | | hCLIg_vk | | R3B VH- | | VL- | |
| | | hFc_Knob | | | | hCH1- | | hCLIg_vl | |
| | | | | | | hFc_Hole | | | |
| 39 | | aCCR2 | SEQ ID | aCCR2 | SEQ ID | aCSF1R | SEQ ID | aCSF1R | SEQ ID |
| | | Hum2 VH- | NO: 372 | VL- | NO: 373 | BI117 C5- | NO: 362 | BI117 | NO: 369 |
| | | hCH1- | | hCLIg_vk | | R3B VH- | | VL- | |
| | | hFc_Knob | | | | hCH1- | | hCLIg_vl | |
| | | | | | | hFc_Hole | | | |
| 40 | | aCCR2 | SEQ ID | aCCR2 | SEQ ID | aCSF1R | SEQ ID | aCSF1R | SEQ ID |
| | | Hum2 VH- | NO: 372 | VL- | NO: 373 | BI117 C6- | NO: 363 | BI117 | NO: 369 |
| | | hCH1- | | hCLIg_vk | | R3B VH- | | VL- | |
| | | hFc_Knob | | | | hCH1- | | hCLIg_vl | |
| | | | | | | hFc_Hole | | | |
| 41 | | aCCR2 | SEQ ID | aCCR2 | SEQ ID | aCSF1R | SEQ ID | aCSF1R | SEQ ID |
| | | Hum2 VH- | NO: 372 | VL- | NO: 373 | BI117 D11- | NO: 364 | BI117 | NO: 369 |
| | | hCH1- | | hCLIg_vk | | R3B VH- | | VL- | |
| | | hFc_Knob | | | | hCH1- | | hCLIg_vl | |
| | | | | | | hFc_Hole | | | |
| 42 | BIM0207 | aCCR2 | SEQ ID | aCCR2 | SEQ ID | aCSF1R | SEQ ID | aCSF1R | SEQ ID |
| | | Hum2 VH- | NO: 372 | VL- | NO: 373 | BI123 | NO: 365 | BI123 | NO: 370 |
| | | hCH1- | | hCLIg_vk | | VH-hCH1- | | VL- | |
| | | hFc_Knob | | | | hFc_Hole | | hCLIg_vl | |
| 43 | | aCCR2 | SEQ ID | aCCR2 | SEQ ID | aCSF1R | SEQ ID | aCSF1R | SEQ ID |
| | | Hum2 VH- | NO: 372 | VL- | NO: 373 | BI123 A5- | NO: 366 | BI123 | NO: 370 |
| | | hCH1- | | hCLIg_vk | | R3B VH- | | VL- | |
| | | hFc_Knob | | | | hCH1- | | hCLIg_vl | |
| | | | | | | hFc_Hole | | | |
| 44 | | aCCR2 | SEQ ID | aCCR2 | SEQ ID | aCSF1R | SEQ ID | aCSF1R | SEQ ID |
| | | Hum2 VH- | NO: 372 | VL- | NO: 373 | BI123 B6- | NO: 367 | BI123 | NO: 370 |
| | | hCH1- | | hCLIg_vk | | R3B VH- | | VL- | |
| | | hFc_Knob | | | | hCH1- | | hCLIg_vl | |
| | | | | | | hFc_Hole | | | |
| 45 | | aCCR2 | SEQ ID | aCCR2 | SEQ ID | aCSF1R | SEQ ID | aCSF1R | SEQ ID |
| | | Hum2 VH- | NO: 372 | VL- | NO: 373 | BI123 C1- | NO: 368 | BI123 | NO: 370 |
| | | hCH1- | | hCLIg_vk | | R3B VH- | | VL- | |
| | | hFc_Knob | | | | hCH1- | | hCLIg_vl | |
| | | | | | | hFc_Hole | | | |
| 46 | | aCCR2 | SEQ ID | aCCR2 | SEQ ID | aCSF1R | SEQ ID | aCSF1R | SEQ ID |
| | | Hum1 VH- | NO: 376 | VL- | NO: 373 | BI117 | NO: 351 | BI117 | NO: 369 |
| | | hCH1- | | hCLIg_vk | | VH-hCH1- | | VL- | |
| | | hFc_Knob- | | | | hFc_Hole | | hCLIg_vl | |
| | | 3x4GS- | | | | | | | |
| | | BH794_V | | | | | | | |
| | | H-3x4GS- | | | | | | | |
| | | BH794_VL | | | | | | | |
| 47 | | aCCR2 | SEQ ID | aCCR2 | SEQ ID | aCSF1R | SEQ ID | aCSF1R | SEQ ID |
| | | Hum1 VH- | NO: 376 | VL- | NO: 373 | BI123 | NO: 365 | BI123 | NO: 370 |
| | | hCH1- | | hCLIg_vk | | VH-hCH1- | | VL- | |
| | | hFc_Knob- | | | | hFc_Hole | | hCLIg_vl | |
| | | 3x4GS- | | | | | | | |
| | | BH794_V | | | | | | | |
| | | H-3x4GS- | | | | | | | |
| | | BH794_VL | | | | | | | |
| 48 | | aCCR2 | SEQ ID | aCCR2 | SEQ ID | aCSF1R | SEQ ID | aCSF1R | SEQ ID |
| | | Hum1 VH- | NO: 371 | VL- | NO: 373 | BI117 | NO: 374 | BI117 | NO: 369 |
| | | hCH1- | | hCLIg_vk | | VH-hCH1- | | VL- | |
| | | hFc_Knob | | | | hFc_Hole- | | hCLIg_vl | |
| | | | | | | 3x4GS- | | | |
| | | | | | | BH794_VH- | | | |
| | | | | | | 3x4GS- | | | |
| | | | | | | BH794_VL | | | |
| 49 | | aCCR2 | SEQ ID | aCCR2 | SEQ ID | aCSF1R | SEQ ID | aCSF1R | SEQ ID |
| | | Hum1 VH- | NO: 371 | VL- | NO: 373 | BI123 | NO: 375 | BI123 | NO: 370 |
| | | hCH1- | | hCLIg_vk | | VH-hCH1- | | VL- | |
| | | hFc_Knob | | | | hFc_Hole- | | hCLIg_vl | |
| | | | | | | 3x4GS- | | | |
| | | | | | | BH794_VH- | | | |
| | | | | | | 3x4GS- | | | |
| | | | | | | BH794_VL | | | |
| 50 | | aCCR2 | SEQ ID | aCCR2 | SEQ ID | aCSF1R | SEQ ID | aCSF1R | SEQ ID |
| | | Hum1 VH- | NO: 371 | VL- | NO: 373 | BI117 | NO: 351 | BI117 | NO: 377 |
| | | hCH1- | | hCLIg_vk | | VH-hCH1- | | VL- | |
| | | hFc_Knob | | | | hFc_Hole | | hCLIg_vl- | |
| | | | | | | | | 3x4GS-IL2 | |
| 51 | | aCCR2 | SEQ ID | aCCR2 | SEQ ID | aCSF1R | SEQ ID | aCSF1R | SEQ ID |
| | | Hum1 VH- | NO: 371 | VL- | NO: 373 | BI123 | NO: 365 | BI123 | NO: 379 |
| | | hCH1- | | hCLIg_vk | | VH-hCH1- | | VL- | |
| | | hFc_Knob | | | | hFc_Hole | | hCLIg_vl- | |
| | | | | | | | | 3x4GS-IL2 | |
| 52 | | aCCR2 | SEQ ID | aCCR2 | SEQ ID | aCSF1R | SEQ ID | aCSF1R | SEQ ID |
| | | Hum1 VH- | NO: 371 | VL- | NO: 373 | BI117 | NO: 351 | BI117 | NO: 378 |
| | | hCH1- | | hCLIg_vk | | VH-hCH1- | | VL- | |
| | | hFc_Knob | | | | hFc_Hole | | hCLIg_vl- | |
| | | | | | | | | IL2 | |
| 53 | | aCCR2 | SEQ ID | aCCR2 | SEQ ID | aCSF1R | SEQ ID | aCSF1R | SEQ ID |
| | | Hum1 VH- | NO: 371 | VL- | NO: 373 | BI123 | NO: 365 | BI123 | NO: 380 |
| | | hCH1- | | hCLIg_vk | | VH-hCH1- | | VL- | |
| | | hFc_Knob | | | | hFc_Hole | | hCLIg_vl- | |
| | | | | | | | | IL2 | |
| 54 | | aCCR2 | SEQ ID | aCCR2 | SEQ ID | aCSF1R | SEQ ID | aCSF1R | SEQ ID |
| | | Hum1 VH- | NO: 371 | VL- | NO: 381 | BI117 | NO: 351 | BI117 | NO: 369 |
| | | hCH1- | | hCLIg_vk- | | VH-hCH1- | | VL- | |
| | | hFc_Knob | | 3x4GS-IL2 | | hFc_Hole | | hCLIg_vl | |
| 55 | | aCCR2 | SEQ ID | aCCR2 | SEQ ID | aCSF1R | SEQ ID | aCSF1R | SEQ ID |
| | | Hum1 VH- | NO: 371 | VL- | NO: 381 | BI117 | NO: 351 | BI117 | NO: 369 |
| | | hCH1- | | hCLIg_vk- | | VH-hCH1- | | VL- | |
| | | hFc_Knob | | 3x4GS-IL2 | | hFc_Hole | | hCLIg_vl | |
| 56 | | aCCR2 | SEQ ID | aCCR2 | SEQ ID | aCSF1R | SEQ ID | aCSF1R | SEQ ID |
| | | Hum1 VH- | NO: 371 | VL- | NO: 382 | BI123 | NO: 365 | BI123 | NO: 370 |
| | | hCH1- | | hCLIg_vk- | | VH-hCH1- | | VL- | |
| | | hFc_Knob | | IL2 | | hFc_Hole | | hCLIg_vl | |
| 57 | | aCCR2 | SEQ ID | aCCR2 | SEQ ID | aCSF1R | SEQ ID | aCSF1R | SEQ ID |
| | | Hum1 VH- | NO: 371 | VL- | NO: 382 | BI123 | NO: 365 | BI123 | NO: 370 |
| | | hCH1- | | hCLIg_vk- | | VH-hCH1- | | VL- | |
| | | hFc_Knob | | IL2 | | hFc_Hole | | hCLIg_vl | |
| 58 | | aCCR2 | SEQ ID | aCCR2 | SEQ ID | aCSF1R | SEQ ID | aCSF1R | SEQ ID |
| | | Hum1 VH- | NO: 385 | VL- | NO: 373 | BI117 | NO: 383 | BI117 | NO: 369 |
| | | hCH1- | | hCLIg_vk | | VH-hCH1- | | VL- | |
| | | hFc_Knob- | | | | hFc_Hole- | | hCLIg_vl | |
| | | 3x4GS- | | | | 3x4GS- | | | |
| | | TGFbR2 | | | | TGFbR2 | | | |
| 59 | | aCCR2 | SEQ ID | aCCR2 | SEQ ID | aCSF1R | SEQ ID | aCSF1R | SEQ ID |
| | | Hum1 VH- | NO: 385 | VL- | NO: 373 | BI123 | NO: 384 | BI123 | NO: 370 |
| | | hCH1- | | hCLIg_vk | | VH-hCH1- | | VL- | |
| | | hFc_Knob- | | | | hFc_Hole- | | hCLIg_vl | |
| | | 3x4GS- | | | | 3x4GS- | | | |
| | | TGFbR2 | | | | TGFbR2 | | | |
| 60 | | aCCR2 | SEQ ID | aCCR2 | SEQ ID | aCSF1R | SEQ ID | | |
| | | Hum1 VH- | NO: 371 | VL- | NO: 373 | BI117 | NO: 386 | | |
| | | hCH1- | | hCLIg_vk | | VH-3x4GS- | | | |
| | | hFc_Knob | | | | aCSF1R | | | |
| | | | | | | BI117 VL- | | | |
| | | | | | | 4GS- | | | |
| | | | | | | hFc_Hole | | | |
| 61 | | aCCR2 | SEQ ID | aCCR2 | SEQ ID | aCSF1R | SEQ ID | | |
| | | Hum1 VH- | NO: 371 | VL- | NO: 373 | BI123 | NO: 387 | | |
| | | hCH1- | | hCLIg_vk | | VH-3x4GS- | | | |
| | | hFc_Knob | | | | aCSF1R | | | |
| | | | | | | BI123 VL- | | | |
| | | | | | | 4GS- | | | |
| | | | | | | hFc_Hole | | | |
| 62 | | aCCR2 | SEQ ID | aCCR2 | SEQ ID | aCSF1R | SEQ ID | | |
| | | Hum1 VH- | NO: 385 | VL- | NO: 373 | BI117 | NO: 388 | | |
| | | hCH1- | | hCLIg_vk | | VH-3x4GS- | | | |
| | | hFc_Knob- | | | | aCSF1R | | | |
| | | 3x4GS- | | | | BI117 VL- | | | |
| | | TGFbR2 | | | | 4GS- | | | |
| | | | | | | hFc_Hole- | | | |
| | | | | | | 3x4GS- | | | |
| | | | | | | TGFbR2 | | | |
| 63 | | aCCR2 | SEQ ID | aCCR2 | SEQ ID | aCSF1R | SEQ ID | | |
| | | Hum1 VH- | NO: 385 | VL- | NO: 373 | BI123 | NO: 389 | | |
| | | hCH1- | | hCLIg_vk | | VH-3x4GS- | | | |
| | | hFc_Knob- | | | | aCSF1R | | | |
| | | 3x4GS- | | | | BI123 VL- | | | |
| | | TGFbR2 | | | | 4GS- | | | |
| | | | | | | hFc_Hole- | | | |
| | | | | | | 3x4GS- | | | |
| | | | | | | TGFbR2 | | | |
| 64 | | aCCR2 | SEQ ID | aCCR2 | SEQ ID | TGFbR2- | SEQ ID | TGFbR2- | SEQ ID |
| | | Hum1 VH- | NO: 392 | VL- | NO: 373 | 3x4GS- | NO: 390 | 3x4GS- | NO: 391 |
| | | hCH1- | | hCLIg_vk | | hCH1- | | hCLIg_vl | |
| | | hFc_Knob- | | | | hFc_Hole | | | |
| | | 3x4GS- | | | | | | | |
| | | BI117 VH- | | | | | | | |
| | | 3x4GS- | | | | | | | |
| | | aCSF1R | | | | | | | |
| | | BI117 VL | | | | | | | |
| 65 | | aCCR2 | SEQ ID | aCCR2 | SEQ ID | TGFbR2- | SEQ ID | TGFbR2- | SEQ ID |
| | | Hum1 VH- | NO: 393 | VL- | NO: 373 | 3x4GS- | NO: 390 | 3x4GS- | NO: 391 |
| | | hCH1- | | hCLIg_vk | | hCH1- | | hCLIg_vl | |
| | | hFc_Knob- | | | | hFc_Hole | | | |
| | | 3x4GS- | | | | | | | |
| | | BI123 VH- | | | | | | | |
| | | 3x4GS- | | | | | | | |
| | | aCSF1R | | | | | | | |
| | | BI123 VL | | | | | | | |
| 66 | BIM0208 | aCCR2 | SEQ ID | aCCR2 | SEQ ID | aCSF1R | SEQ ID | aCSF1R | SEQ ID |
| | | Hum1 VH- | NO: 371 | VL- | NO: 373 | BI117 | NO: 351 | BI123 | NO: 370 |
| | | hCH1- | | hCLIg_vk | | VH-hCH1- | | VL- | |
| | | hFc_Knob | | | | hFc_Hole | | hCLIg_vl | |
| 67 | BIM0209 | aCCR2 | SEQ ID | aCCR2 | SEQ ID | aCSF1R | SEQ ID | aCSF1R | SEQ ID |
| | | Hum1 VH- | NO: 371 | VL- | NO: 373 | BI123 | NO: 365 | BI117 | NO: 369 |
| | | hCH1- | | hCLIg_vk | | VH-hCH1- | | VL- | |
| | | hFc_Knob | | | | hFc_Hole | | hCLIg_vl | |
| 68 | BIM0210 | aCCR2 | SEQ ID | aCCR2 | SEQ ID | aCSF1R | SEQ ID | aCSF1R | SEQ ID |
| | | Hum2 VH- | NO: 372 | VL- | NO: 373 | BI117 | NO: 351 | BI123 | NO: 370 |
| | | hCH1- | | hCLIg_vk | | VH-hCH1- | | VL- | |
| | | hFc_Knob | | | | hFc_Hole | | hCLIg_vl | |
| 69 | BIM0211 | aCCR2 | SEQ ID | aCCR2 | SEQ ID | aCSF1R | SEQ ID | aCSF1R | SEQ ID |
| | | Hum2 VH- | NO: 372 | VL- | NO: 373 | BI123 | NO: 365 | BI117 | NO: 369 |
| | | hCH1- | | hCLIg_vk | | VH-hCH1- | | VL- | |
| | | hFc_Knob | | | | hFc_Hole | | hCLIg_vl | |
| 70 | BIM0542 | hFc_Knob | SEQ ID | | | aCSF1R | SEQ ID | aCSF1R | SEQ ID |
| | | (H435R, | NO: 401 | | | BI117 C5- | NO: 352 | BI117 | NO: 369 |
| | | Y436F)- | | | | R2A VH- | | VL- | |
| | | 2x4GS- | | | | hCH1- | | hCLIg_vl | |
| | | HHHHHHHH | | | | hFc_Hole | | | |
| 71 | BIM0543 | hFc_Knob | SEQ ID | | | aCSF1R | SEQ ID | aCSF1R | SEQ ID |
| | | (H435R, | NO: 401 | | | BI117 C9- | NO: 353 | BI117 | NO: 369 |
| | | Y436F)- | | | | R2A VH- | | VL- | |
| | | 2x4GS- | | | | hCH1- | | hCLIg_vl | |
| | | HHHHHHHH | | | | hFc_Hole | | | |
| 72 | BIM0544 | hFc_Knob | SEQ ID | | | aCSF1R | SEQ ID | aCSF1R | SEQ ID |
| | | (H435R, | NO: 401 | | | BI117 D1- | NO: 354 | BI117 | NO: 369 |
| | | Y436F)- | | | | R2A VH- | | VL- | |
| | | 2x4GS- | | | | hCH1- | | hCLIg_vl | |
| | | HHHHHHHH | | | | hFc_Hole | | | |
| 73 | BIM0545 | hFc_Knob | SEQ ID | | | aCSF1R | SEQ ID | aCSF1R | SEQ ID |
| | | (H435R, | NO: 401 | | | BI117 E2- | NO: 355 | BI117 | NO: 369 |
| | | Y436F)- | | | | R2B VH- | | VL- | |
| | | 2x4GS- | | | | hCH1- | | hCLIg_vl | |
| | | HHHHHHHH | | | | hFc_Hole | | | |
| 74 | BIM0546 | hFc_Knob | SEQ ID | | | aCSF1R | SEQ ID | aCSF1R | SEQ ID |
| | | (H435R, | NO: 401 | | | BI117 G1- | NO: 356 | BI117 | NO: 369 |
| | | Y436F)- | | | | R2B VH- | | VL- | |
| | | 2x4GS- | | | | hCH1- | | hCLIg_vl | |
| | | HHHHHHHH | | | | hFc_Hole | | | |
| 75 | BIM0547 | hFc_Knob | SEQ ID | | | aCSF1R | SEQ ID | aCSF1R | SEQ ID |
| | | (H435R, | NO: 401 | | | BI117 G12- | NO: 357 | BI117 | NO: 369 |
| | | Y436F)- | | | | R2B VH- | | VL- | |
| | | 2x4GS- | | | | hCH1- | | hCLIg_vl | |
| | | HHHHHHHH | | | | hFc_Hole | | | |
| 76 | BIM0548 | hFc_Knob | SEQ ID | | | aCSF1R | SEQ ID | aCSF1R | SEQ ID |
| | | (H435R, | NO: 401 | | | BI117 D6- | NO: 358 | BI117 | NO: 369 |
| | | Y436F)- | | | | R3B VH- | | VL- | |
| | | 2x4GS- | | | | hCH1- | | hCLIg_vl | |
| | | HHHHHHHH | | | | hFc_Hole | | | |
| 77 | BIM0549 | hFc_Knob | SEQ ID | | | aCSF1R | SEQ ID | aCSF1R | SEQ ID |
| | | (H435R, | NO: 401 | | | BI117 A6- | NO: 359 | BI117 | NO: 369 |
| | | Y436F)- | | | | R3B VH- | | VL- | |
| | | 2x4GS- | | | | hCH1- | | hCLIg_vl | |
| | | HHHHHHHH | | | | hFc_Hole | | | |
| 78 | BIM0550 | hFc_Knob | SEQ ID | | | aCSF1R | SEQ ID | aCSF1R | SEQ ID |
| | | (H435R, | NO: 401 | | | BI117 A11- | NO: 360 | BI117 | NO: 369 |
| | | Y436F)- | | | | R3B VH- | | VL- | |
| | | 2x4GS- | | | | hCH1- | | hCLIg_vl | |
| | | HHHHHHHH | | | | hFc_Hole | | | |
| 79 | BIM0551 | hFc_Knob | SEQ ID | | | aCSF1R | SEQ ID | aCSF1R | SEQ ID |
| | | (H435R, | NO: 401 | | | BI117 B2- | NO: 361 | BI117 | NO: 369 |
| | | Y436F)- | | | | R3B VH- | | VL- | |
| | | 2x4GS- | | | | hCH1- | | hCLIg_vl | |
| | | HHHHHHHH | | | | hFc_Hole | | | |
| 80 | BIM0552 | hFc_Knob | SEQ ID | | | aCSF1R | SEQ ID | aCSF1R | SEQ ID |
| | | (H435R, | NO: 401 | | | BI117 | NO: 351 | BI117 | NO: 369 |
| | | Y436F)- | | | | VH-hCH1- | | VL- | |
| | | 2x4GS- | | | | hFc_Hole | | hCLIg_vl | |
| | | HHHHHHHH | | | | | | | |
| 81 | BIM0553 | hFc_Knob | SEQ ID | | | aCSF1R | SEQ ID | aCSF1R | SEQ ID |
| | | (H435R, | NO: 401 | | | BI117 C5- | NO: 362 | BI117 | NO: 369 |
| | | Y436F)- | | | | R3B VH- | | VL- | |
| | | 2x4GS- | | | | hCH1- | | hCLIg_vl | |
| | | HHHHHHHH | | | | hFc_Hole | | | |
| 82 | BIM0554 | hFc_Knob | SEQ ID | | | aCSF1R | SEQ ID | aCSF1R | SEQ ID |
| | | (H435R, | NO: 401 | | | BI123 A5- | NO: 366 | BI123 | NO: 370 |
| | | Y436F)- | | | | R3B VH- | | VL- | |
| | | 2x4GS- | | | | hCH1- | | hCLIg_vl | |
| | | HHHHHHHH | | | | hFc_Hole | | | |
| 83 | BIM0555 | hFc_Knob | SEQ ID | | | aCSF1R | SEQ ID | aCSF1R | SEQ ID |
| | | (H435R, | NO: 401 | | | BI123 B6- | NO: 367 | BI123 | NO: 370 |
| | | Y436F)- | | | | R3B VH- | | VL- | |
| | | 2x4GS- | | | | hCH1- | | hCLIg_vl | |
| | | HHHHHHHH | | | | hFc_Hole | | | |
| 84 | BIM0556 | hFc_Knob | SEQ ID | | | aCSF1R | SEQ ID | aCSF1R | SEQ ID |
| | | (H435R, | NO: 401 | | | BI123 C1- | NO: 368 | BI123 | NO: 370 |
| | | Y436F)- | | | | R3B VH- | | VL- | |
| | | 2x4GS- | | | | hCH1- | | hCLIg_vl | |
| | | HHHHHHHH | | | | hFc_Hole | | | |
| 85 | BIM0566 | hFc_Knob | SEQ ID | | | aCSF1R | SEQ ID | aCSF1R | SEQ ID |
| | | (H435R, | NO: 401 | | | BI117 C6- | NO: 363 | BI117 | NO: 369 |
| | | Y436F)- | | | | R3B VH- | | VL- | |
| | | 2x4GS- | | | | hCH1- | | hCLIg_vl | |
| | | HHHHHHHH | | | | hFc_Hole | | | |
| 86 | BIM0567 | hFc_Knob | SEQ ID | | | aCSF1R | SEQ ID | aCSF1R | SEQ ID |
| | | (H435R, | NO: 401 | | | BI117 D11- | NO: 364 | BI117 | NO: 369 |
| | | Y436F)- | | | | R3B VH- | | VL- | |
| | | 2x4GS- | | | | hCH1- | | hCLIg_vl | |
| | | HHHHHHHH | | | | hFc_Hole | | | |

TABLE 34
Exemplary UniTI-102 molecules.
BIM0648

| | | |
|---|---|---|
| SEQ ID | aCSF1R BI117 | GFTFSNDEMN |
| NO: 402 | C5-R2A | |
| | HCDR1 | |
| SEQ ID | aCSF1R BI117 | YISSGSSTIYYADAVKG |
| NO: 405 | C5-R2A | |
| | HCDR2 | |
| SEQ ID | aCSF1R BI117 | GVDGDFSFDY |
| NO: 413 | C5-R2A | |
| | HCDR3 | |
| SEQ ID | aCSF1R BI117 | EVQLVESGGGLVQPGGSLRLSCAASGFTFSDEMNWIRQAPGKGLEWV |
| NO: 324 | C5-R2A VH aa | SYISSGSSTITTADAVKGRFTISRDNARNSLYLQMNSLRATETAVYYCAR |
| | | GVDGDFSFDYWGQGTLVTVSS |
| SEQ ID | aCSF1R BI117 | GAAGTGCAGCTGGTTGAATCTGGCGGAGGACTGGTTCAGCCTGGCGG |
| NO: 129 | C5-R2A VH nt | ATCTCTGAGACTGTCTTGTGCCGCCTCTGGCTTCACCTTCTCCAACGA |
| | | CGAGATGAACTGGATCAGACAGGCCCCTGGCAAAGGCCTGGAATGG |
| | | GTGTCCTACATCTCCTCCGGCTCCTCCACCATCTACTACGCCGATGCT |
| | | GTGAAGGGCAGATTCACCATCTCTCGGGACAACGCCCGGAACTCCCT |
| | | GTACCTGCAGATGAACTCTCTGAGAGCCGAGGACACCGCCGTGTACT |
| | | ACTGTGCTAGAGGCGTGGACGGCGACTTCTCCTTCGATTATTGGGGOC |
| | | AGGGCACCCTGGTCACAGTTTCTAGC |
| SEQ ID | aCSF1R BI117 | TGSSSNIGAGYDVH |
| NO: 432 | LCDR1 | |
| SEQ ID | aCSF1R BI117 | GNSNRPS |
| NO: 434 | LCDR2 | |
| SEQ ID | aCSF1R BI117 | QSYDSSLSEEV |
| NO: 436 | LCDR3 | |
| SEQ ID | aCSF1R BI117 | QLVLTQPPSVSGAPGQRVTISCTGSSSNIGAGYDVHWYQQLPGTAPKLLI |
| NO: 341 | VL aa | YGNSNRPSGVPDRFSGSKSGTSASLAITGLQAEDEADYYCQSYDSSLSEE |
| | | VFGGGTKLTVL |
| SEQ ID | aCSF1R BI117 | CAGCTGGTTTTGACCCAGCCTCCTTCCGTGTCTGGTGCTCCTGGACAG |
| NO: 130 | VL nt | AGAGTGACCATCTCTTGCACCGGCTCCAGCTCCAATATCGGCGCTGGC |
| | | TACGACGTGCACTGGTATCAGCAGCTGCCTGGCACAGCTCCCAAACT |
| | | GCTGATCTACGGCAACTCCAACCGGCCTTCTGGCGTGCCCGATAGATT |
| | | CTCCGGCTCTAAGTCTGGCACCTCTGCCAGCCTGGCTATCACTGGACT |
| | | GCAGGCTGAGGACGAGGCCGACTACTACTGCCAGTCCTACGACTCCA |
| | | GCCTGTCCGAGGAAGTTTTTGGCGGAGGCACCAAGCTGACCGTGCTG |
| SEQ ID | aCSF1R BI117 | EVQLVESGGGLVQPGGSLRLSCAASGFTFSNDEMNWIRQAPGKGLEWV |
| NO: 127 | C5-R2A VH- | SYISSGSSTIYYADAVKGRFTISRDNARNSLYLQMNSLRAEDTAVYYCAR |
| | 4x4GS-aCSF1R | GVDGDFSFDYWGQGTLVTVSSGGGGSGGGGSGGGGSGGGGSQLVLTQP |
| | BI117 VL- | PSVSGAPGQRVTISCTGSSSNIGAGYDVHWYQQLPGTAPKLLIYGNSNRP |
| | hFc_Knob- | SGVPDRFSGSKSGTSASLAITGLQAEDEADYYCQSYDSSLSEEVFGGGTK |
| | 4x4GS- | LTVLDKTHTCPPCPAPELLGGPSVFLFPPKPKDTLIMSRTPEVTCVVVDVS |
| | TGFbR2 aa | HEDPEVKFNWYVDGVEVHNAKTKPREEQYNSTYRVVSVLTVLHQDWL |
| | | NGKEYKCKVSNKALPAPIEKTISKAKGQPREPQVYTLPPCREEMTKNQV |
| | | SLWCLVKGFYPSDIAVEWESNGQPENNYKTTPPVLDSDGSFFLYSKLTV |
| | | DKSRWQQGNVFSCSVMHEALHNHYTQKSLSLSPGKGGGGSGGGGSGG |
| | | GGSGGGGSIPPHVQKSVNNDMIVTDNNGAVKFPQLCKFCDVRFSTCDNQ |
| | | KSCMSNCSITSICEKPQEVCVAVWRKNDENITLETVCHDPKLPYHDFILE |
| | | DAASPKCIMKEKKKPGETFFMCSCSSDECNDNIIFSEEYNTSNPD |
| SEQ ID | aCSF1R BI117 | GAAGTGCAGCTGGTTGAATCTGGCGGAGGACTGGTTCAGCCTGGCGG |
| NO: 128 | C5-R2A VH- | ATCTCTGAGACTGTCTTGTGCCGCCTCTGGCTTCACCTTCTCCAACGA |
| | 4x4GS-aCSF1R | CGAGATGAACTGGATCAGACAGGCCCCTGGCAAAGGCCTGGAATGG |
| | BI117 VL- | GTGTCCTACATCTCCTCCGGCTCCTCCACCATCTACTACGCCGATGCT |
| | hFc_Knob- | GTGAAGGGCAGATTCACCATCTCTCGGGACAACGCCCGGAACTCCCT |
| | 4x4GS- | GTACCTGCAGATGAACTCTCTGAGAGCCGAGGACACCGCCGTGTACT |
| | TGFbR2 nt | ACTGTGCTAGAGGCGTGGACGGCGACTTCTCCTTCGATTATTGGGGCC |
| | | AGGGCACCCTGGTCACAGTTTCTAGCGGAGGCGGAGGTTCTGGCGGC |
| | | GGTGGAAGTGGCGGTGGTGGATCAGGCGGCGGAGGATCTCAGCTGGT |
| | | TTTGACCCAGCCTCCTTCCGTGTCTGGTGCTCCTGGACAGAGAGTGAC |
| | | CATCTCTTGCACCGGCTCCAGCTCCAATATCGGCGCTGGCTACGACGT |
| | | GCACTGGTATCAGCAGCTGCCTGGCACAGCTCCCAAACTGCTGATCT |
| | | ACGGCAACTCCAACCGGCCTTCTGGCGTGCCCGATAGATTCTCCGGCT |
| | | CTAAGTCTGGCACCTCTGCCAGCCTGGCTATCACTGGACTGCAGGCTG |
| | | AGGACGAGGCCGACTACTACTGCCAGTCCTACGACTCCAGCCTGTCC |
| | | GAGGAAGTTTTTGGCGGAGGCACCAAGCTGACCGTGCTGGACAAGAC |
| | | CCATACCTGTCCTCCATGTCCTGCTCCAGAGCTGCTCGGAGGCCCTTC |
| | | TGTGTTCCTGTTTCCTCCAAAGCCTAAGGACACCCTGATGATCTCTCG |
| | | GACCCCTGAAGTGACCTGCGTGGTGGTCGATGTGTCTCACGAGGATC |
| | | CCGAAGTGAAGTTCAATTGGTACGTCGACGGCGTCGAGGTGCACAAC |
| | | GCTAAGACCAAGCCTAGAGAGGAACAGTACAACTCCACCTACAGAGT |
| | | GGTGTCCGTGCTGACAGTGCTGCACCAGGATTGGCTGAACGGCAAAG |
| | | AGTACAAGTGCAAGGTGTCCAACAAGGCCCTGCCTGCTCCTATCGAA |
| | | AAGACCATCTCCAAGGCCAAGGGCCAGCCTAGGGAACCCCAGGTTTA |
| | | CACCCTGCCTCCATGCCGGGAAGAGATGACCAAGAACCAGGTGTCCC |
| | | TGTGGTGCCTGGTCAAGGGCTTCTACCCTTCCGATATCGCCGTGGAAT |
| | | GGGAGAGCAATGGCCAGCCTGAGAACAACTACAAGACCACACCTCCT |
| | | GTGCTGGACTCCGACGGCTCATTCTTCCTGTACAGCAAGCTGACTGTG |
| | | GATAAGTCCCGGTGGCAGCAGGGCAACGTGTTCTCCTGTTCTGTGATG |
| | | CACGAGGCCCTGCACAACCACTACACCCAGAAGTCCCTGTCTCTGTCT |
| | | CCCGGAAAAGGTGGTGGTGGTAGTGGTGGCGGTGGCTCTGGTGGTGG |
| | | CGGATCCGGCGGAGGCGGTTCTATTCCTCCACACGTGCAGAAATCCG |
| | | TGAACAACGACATGATCGTGACCGACAACAATGGCGCCGTGAAGTTC |
| | | CCTCAGCTGTGCAAGTTTTGCGACGTGCGGTTCTCTACCTGCGACAAC |
| | | CAGAAATCCTGCATGTCCAACTGCTCCATCACCTCCATCTGCGAGAAG |
| | | CCCCAAGAAGTGTGCGTCGCCGTCTGGCGGAAGAACGATGAGAACAT |
| | | CACCCTGGAAACCGTGTGCCACGATCCTAAGCTGCCCTACCACGACTT |
| | | CATCCTGGAAGATGCCGCTTCTCCCAAGTGCATCATGAAGGAAAAGA |
| | | AGAAGCCCGGCGAGACTTTCTTCATGTGCAGCTGCTCCTCCGACGAGT |
| | | GCAACGACAACATCATCTTCTCCGAAGAGTATAACACCAGCAATCCC |
| | | GAC |
| SEQ ID | aCCR2 Hum1 | GFSFNAYAMN |
| NO: 446 | HCDR1 | |
| SEQ ID | aCCR2 Hum1 | RIRTKNNNYATYYADSVKD |
| NO: 447 | HCDR2 | |
| SEQ ID | aCCR2 Hum1 | FYGNGV |
| NO: 448 | HCDR3 | |
| SEQ ID | aCCR2 Hum1 | EVQLVESGGGLVKPGGSLRLSCAASGFSFNAYAMNWVRQAPGKGLEW |
| NO: 343 | VH aa | VGRIRTKNNNYATYYADSVKDRFTISRDDSKSTLYLQMNSLK1EDTAVY |
| | | YCTTFYGNGVWGQGTTVTVSS |
| SEQ ID | aCCR2 Hum1 | GAAGTGCAGCTGGTTGAATCTGGCGGCGGACTGGTTAAGCCTGGCGG |
| NO: 133 | VH nt | ATCTCTGAGACTGTCTTGTGCCGCCTCCGGCTTCTCCTTCAATGCCTAC |
| | | GCCATGAACTGGGTOCGACAGGCTCCTGGCAAAGGCCTGGAATGGGT |
| | | CGGAAGAATCCGGACCAAGAACAACAACTACGCCACCTACTACGCCG |
| | | ACTCCGTGAAGGACCGGTTCACCATCTCTCGGGACGACTCCAAGAGC |
| | | ACCCTGTACCTGCAGATGAACTCCCTGAAAACCGAGGACACCGCCGT |
| | | GTACTACTGCACCACCTTCTACGGCAATGGCGTGTGGGGCCAGGGCA |
| | | CAACAGTGACAGTCTCTTCC |
| SEQ ID | aCCR2 Hum1 | EVQLVESGGGLVKPGGSLRLSCAASGFSFNAYAMNWVRQPGKGLEW |
| NO: 131 | VH-hCH1- | VGRIRTKNNNYATYYADSVKDRFTISRDDSKSTLYLQMNSLKTEDTAVY |
| | hFc_Hole- | YCTTFYGNGVWGQGTTVTVSASTKGPSVFPLAPSSKSTSGGTAALGCL |
| | 4x4GS- | VKDYFPEPVTVSWNSGALTSGVHTFPAVLQSSGLYSLSSVVTVPSSSLGT |
| | TGFbR2 aa | QTYICNVNHKPSNTKVDKRVEPKSCDKTHTCPPCPAPELLGGPSVFLFPP |
| | | KPKDTLMISRTPEVTCVVVDVSHEDPEVKFNWYVDGVEVHNAKTKPRE |
| | | EQYNSTYRVVSVLTVLHQDWLNGKEYKCKVSNKALPAPIEKTISKAKGQ |
| | | PREPQVCTLPPSREEMTKNQVSLSCAVKGFYPSDIAVEWESNGQPENNY |
| | | KTTPPVLDSDGSFFLVSKLTVDKSRWQQGNVFSCSVMHEALHNHYTQK |
| | | SLSLSPGKGGGGSGGGGSGGGGSGGGGSIPPHVQKSVNNDMIVTDNNGA |
| | | VKFPQLCKFCDVRFSTCDNQKSCMSNCSITSICEKPQEVCVAVWRKNDE |
| | | NITLETVCHDPKLPYHDFILEDAASPKCIMKEKKKPGETFFMCSCSSDEC |
| | | NDNIIFSEEYNTSNPD |
| SEQ ID | aCCR2 Hum1 | GAAGTGCAGCTGGTTGAATCTGGCGGCGGACTGGTTAAGCCTGGCGG |
| NO: 132 | VH-hCH1- | ATCTCTGAGACTGTCTTGTGCCGCCTCCGGCTTCTCCTTCAATGCCTAC |
| | hFc_Hole- | GCCATGAACTGGGTCCGACAGGCTCCTGGCAAAGGCCTGGAATGGGT |
| | 4x4GS- | CGGAAGAATCCGGACCAAGAACAACAACTACGCCACCTACTACGCCG |
| | TGFbR2 nt | ACTCCGTGAAGGACCGGTTCACCATCTCTCGGGACGACTCCAAGAGC |
| | | ACCCTGTACCTGCAGATGAACTCCCTGAAAACCGAGGACACCGCCGT |
| | | GTACTACTGCACCACCTTCTACGGCAATGGCGTGTGGGGCCAGGGCA |
| | | CAACAGTGACAGTCTCTTTCCGCCTTCCACCAAGGGACCCTCTGTGTTTC |
| | | CTCTGGCTCCCTCCAGCAAGTCTACCTCTGGTGGAACAGCTGCCCTGG |
| | | GCTGCCTGGTCAAGGATTACTTTTCCTGAGCCTGTGACCGTGTCCTGGA |
| | | ACTCTGGCGCTCTGACATCTGGCGTGCACACCTTTTCCAGCTGTGCTGC |
| | | AGTCCTCCGGCCTGTACTCTCTGTCCTCTGTCGTGACCGTGCCTTCCA |
| | | GCTCTCTGGGCACCCAGACCTACATCTGCAATGTGAACCACAAGCCTT |
| | | CCAACACCAAGGTGGACAAGAGAGTGGAACCCAAGTCCTGCGACAA |
| | | GACCCACACCTGTCCTCCATGTCCTGCTCCAGAACTGCTCGGCGGACC |
| | | TTCCGTGTTCCTGTTTCCTCCAAAGCCTAAGGACACCCTGATGATCTC |
| | | TCGGACCCCTGAAGTGACCTGCGTGGTGGTGGATGTGTCTCACGAGG |
| | | ATCCCGAAGTGAAGTTCAATTGGTACGTGGACGGCGTGGAAGTGCAC |
| | | AACGCCAAGACCAAGCCTAGAGAGGAACAGTACAACTCCACCTACA |
| | | GAGTGGTGTCCGTGCTGACCGTGCTGCACCAGGATTGGCTGAACGGC |
| | | AAAGAGTACAAGTGCAAGGTGTCCAACAAGGCCCTGCCTGCTCCTAT |
| | | CGAAAAGACCATCTCCAAGGCCAAGGGCCAGCCTCGGGAACCTCAAG |
| | | TCTGTACCCTGCCTCCTAGCCGGGAAGAGATGACCAAGAATCAGGTG |
| | | TCCCTGTCCTGCGCCGTGAAGGGCTTCTACCCTTCTGATATCGCCGTG |
| | | GAATGGGAGAGCAACGGCCAGCCTGAGAACAACTACAAGACAACCC |
| | | CTCCTGTGCTGGACTCCGACGGCTCATTCTTCCTGGTGTCCAAGCTGA |
| | | CAGTGGACAAGTCCAGATGGCAGCAGGGCAACGTGTTCTCCTGCTCC |
| | | GTGATGCACGAGGCCCTGCACAATCACTACACCCAGAAGTCCCTGTC |
| | | TCTGAGCCCAGGCAAAGGTGGCGGAGGATCTGGCGGAGGTGGTAGC |
| | | GGCGGAGGCGGATCAGGCGGTGGTGGCTCTATTCCTCCACACGTGCA |
| | | GAAATCCGTGAACAACGACATGATCGTGACCGACAACAACGGCGCTG |
| | | TGAAGTTCCCTCAGCTGTGCAAGTTCTGCGACGTGCGGTTCTCCACCT |
| | | GTGACAACCAGAAATCCTGCATGTCCAACTGCTCCATCACCTCCATCT |
| | | GCGAGAAGCCCCAAGAAGTGTGCGTCGCCGTCTGGCGGAAGAACGA |
| | | CGAGAACATCACCCTGGAAACCGTGTGCCACGATCCTAAGCTGCCCT |
| | | ACCACGACTTCATCCTGGAAGATGCCGCCTCTCCTAAGTGCATCATGA |
| | | AGGAAAAGAAGAAGCCCGGCGAGACTTTCTTCATGTGCAGCTGCTCC |
| | | TCCGACGAGTGCAACGACAACATCATCTTCTCCGAAGAGTATAACAC |
| | | CAGCAATCCCGAC |
| SEQ ID | aCCR2 VL | KSSQSLLDSDGKTFLN |
| NO: 454 | LCDR1 | |
| SEQ ID | aCCR2 VL | LVSKLDS |
| NO: 455 | LCDR2 | |
| SEQ ID | aCCR2 VL | WQGTHFPYT |
| NO: 456 | LCDR3 | |
| SEQ ID | aCCR2 VL aa | DVVMTQSPLSLPVTLGQPASISCKSSQSLLDSDGKTFLNWLQQRPGQSPR |
| NO: 345 | | RLIYLVSKLDSGVPDRFSGSGSGTDFTLKISRVEAEDVGVYYCWQGTHFP |
| | | YTFGGGTKVEIK |
| SEQ ID | aCCR2 VL nt | GACGTCGTCATGACCCAATCCCCGCTCTCCCTGCCGGTGACTCTCGGC |
| NO: 272 | | CAGCCGGCGTCCATCTCGTGCAAGTCCTCCCAATCCCTGCTGGATTCG |
| | | GATGGGAAGACTTTCCTGAACTGGCTGCAGCAACGGCCCGGCCAGTC |
| | | GCCACGGCGGCTGATCTACCTGGTGTCCAAGCTGGATTCAGGTGTGC |
| | | CTGATAGATTCTCCGGCAGCGGATCGGGGACCGACTTCACGCTGAAG |
| | | ATCTCCAGAGTGGAAGCAGAGGACGTGGGCGTCTATTACTGTTGGCA |
| | | GGGGACTCATTTCCCCTATACCTTTGGAGGTGGTACTAAGGTGGAAAT |
| | | TAAG |
| SEQ ID | aCCR2 VL- | DVVMTQSPLSLPVTLGQPASISCKSSQSLLDSDGKTFLNWLQQRPGQSPR |
| NO: 373 | hCLIg_vk aa | RLIYLVSKLDSGVPDRFSGSGSGTDFTLKISRVEAEDVGVYYCWQGTHFP |
| | | YTFGGGTKVEIKRTVAAPSVFIFPPSDEQLKSGTASVVCLLNNFYPREAK |
| | | VQWKVDNALQSGNSQESVTEQDSKDSTYSLSSTLTLSKADYEKHKVYA |
| | | CEVTHQGLSSPVTKSFNRGEC |
| SEQ ID | aCCR2 VL- | GACGTCGTCATGACCCAATCCCCGCTCTCCCTGCCGGTGACTCTCGGC |
| NO: 134 | hCLIg_vk nt | CAGCCGGCGTCCATCTCGTGCAAGTCCTCCCAATCCCTGCTGGATTCG |
| | | GATGGGAAGACTTTCCTGAACTGGCTGCAGCAACGGCCCGGCCAGTC |
| | | GCCACGGCGGCTGATCTACCTGGTGTCCAAGCTGGATTCAGGTGTGC |
| | | CTGATAGATTCTCCGGCAGCGGATCGGGGACCGACTTCACGCTGAAG |
| | | ATCTCCAGAGTGGAAGCAGAGGACGTGGGCGTCTATTACTGTTGGCA |
| | | GGGGACTCATTTCCCCTATACCTTTGGAGGTGGTACTAAGGTGGAAAT |
| | | TAAGAGAACAGTGGCCGCTCCTTCCGTGTTCATCTTCCCACCCTCCGA |
| | | CGAGCAGCTGAAGTCCGGCACCGCTTCTGTCGTGTGCCTGCTCAACA |
| | | ACTTCTACCCTCGGGAAGCCAAGGTGCAGTGGAAGGTGGACAACGCC |
| | | CTGCAGTCCGGCAACTCCCAGGAATCCGTCACCGAGCAGGACTCCAA |
| | | GGACAGCACCTACTCCCTGTCCTCCACCCTGACCCTGTCCAAGGCCGA |
| | | CTACGAGAAGCACAAGGTGTACGCCTGCGAAGTGACCCACCAGGGCC |
| | | TGAGCAGCCCCGTGACCAAGTCCTTCAACCGGGGCGAGTGC |

BIM0652

| | | |
|---|---|---|
| SEQ ID | aCSF1R BI123 | GFTFSSYAMH |
| NO: 403 | B6-R3B | |
| | HCDR1 | |
| SEQ ID | aCSF1R BI123 | VIPYYGSNKYYADSVKG |
| NO: 411 | B6-R3B | |
| | HCDR2 | |
| SEQ ID | aCSF1R BI123 | ELDYGDYGLDV |
| NO: 422 | B6-R3B | |
| | HCDR3 | |
| SEQ ID | aCSF1R BI123 | QVQLVQSGGGVVQPGRSLRLSCAASGFTFSSYAMHWVRQAPGKGLEW |
| NO: 339 | B6-R3B VH aa | VAVIPYYGSNKYYADSVKGRFTISRDNSKNTLYLQMNSLRAEDTAVYYC |
| | | ARELDYGDYGLDVWGKGTTVTVSS |
| SEQ ID | aCSF1R BI123 | CAGGTGCAGCTGGTTCAATCTGGCGGCGGAGTTGTGCAGCCTGGCAG |
| NO: 138 | B6-R3B VH nt | ATCTCTGAGACTGTCTTGTGCCGCCTCCGGCTTCACCTTCTCCTCTTAC |
| | | GCTATGCACTGGGTCCGACAGGCCCCTGGCAAAGGATTGGAATGGGT |
| | | CGCCGTGATTCCCTACTACGGCTCCAACAAGTACTACGCCGACTCCGT |
| | | GAAGGGCAGATTCACCATCTCTCGGGACAACTCCAAGAACACCCTGT |
| | | ACCTGCAGATGAACTCCCTGAGAGCCGAGGACACCGCCGTGTACTAC |
| | | TGTGCCAGAGAGCTGGACTACGGCGATTACGGCCTGGATGTGTGGGG |
| | | CAAGGGCACCACAGTGACAGTTTCTAGC |
| SEQ ID | aCSF1R BI123 | GGNNIGSKSVH |
| NO: 433 | LCDR1 | |
| SEQ ID | aCSF1R BI123 | DDSDRPS |
| NO: 435 | LCDR2 | |
| SEQ ID | aCSF1R BI123 | QVWDSSSDHVV |
| NO: 437 | LCDR3 | |
| SEQ ID | aCSF1R BI123 | SYVLTQPPSVSVAPGKTARITCGGNNIGSKSVHWYQQKPGQAPVLVVYD |
| NO: 139 | VL aa | DSDRPSGIPERFSGSNGNTATLTISRVEAGDEADYYCQVWDSSSDHVVF |
| | | GGGTQLTVL |
| SEQ ID | aCSF1R BI123 | TCTTACGTGCTGACCCAGCCTCETTCCGTGTCTGTGGCTCCTGGCAAG |
| NO: 140 | VL nt | ACCGCCAGAATCACCTGTGGCGGCAACAACATCGGCTCCAAGTCCGT |
| | | GCACTGGTATCAGCAGAAGCCAGGCCAGGCTCCTGTGCTGGTGGTGT |
| | | ACGACGACTCCGATAGACCCTCTGGCATCCCTGAGCGGTTCTCCGGCT |
| | | CTAACTCTGGCAACACCGCTACACTGACCATCTCCAGAGTGGAAGCT |
| | | GGCGACGAGGCCGACTACTACTGCCAAGTGTGGGACTCCTCCTCCGA |
| | | TCACGTGGTGTTTGGCGGAGGCACACAGCTGACCGTGCTG |
| SEQ ID | aCSF1R BI123 | QVQLVQSGGGVVQPSRSLRLSCAASGFTFSSYAMHWVRQAPGKGLEW |
| NO: 136 | B6-R3B VH- | VAVIPYYGSNKYYADSVKGRFTISRDNSKNTLYLQMNSLRAEDTAVYYC |
| | 4x4GS-aCSF1R | ARELDYGDYGLDVWGKGTTVTVSSGGGGSGGGGSGGGGSGGGGSSYV |
| | BI123 VL- | LTQPPSVSVAPGKTARITCGGNNIGSKSVHWYQQKPGQAPVLVVYDDSD |
| | hFc_Knob- | RPSGIPERFSGSNSGNTATLTISRVEAGDEADYYCQVWDSSSDHVVFGGG |
| | 4x4GS- | TQLTVLDKTHTCPPCPAPELLGGPSVFLFPPKPKDTLMISRTPEVTCVVVD |
| | TGFbR2 aa | VSHEDPEVKFNWYVDGVEVHNAKTKPREEQYNSTRYVVSVLTVLHQD |
| | | WLNGKEYKCKVSNKALPAPIEKTISKAKGQPREPQVYTLPPCREEMTKN |
| | | QVSLWCLVKGFYPSDIAVEWESNGQPENNYKTTPPVLDSDGSFFLYSKL |
| | | TVDKSRWQQGNVFSCSVMHEALHNHYTQKSLSLSPGKGGGGSGGGGSG |
| | | GGGSGGGGSIPPHVQKSVNNDMIVTDNNGAVKFPQLCKFCDVRFSTCDN |
| | | QKSCMSNCSITSICEKPQEVCVAVWRKNDENITLETVCHDPKLPYHDFIL |
| | | EDAASPKCIMKEKKKPGETFFMCSCSSDECNDNIFFSEEYNTSNPD |
| SEQ ID | aCSF1R BI123 | CAGGTGCAGCTGGTTCAATCTGGCGGCGGACTTGTGCAGCCTGGCAG |
| NO: 137 | B6-R3B VH- | ATCTCTGAGACTGTCTTGTGCCGCCTCCGGCTTCACCTTCTCCTCTTAC |
| | 4x4GS-aCSF1R | CCTATGCACTGGGTCCGACAGGCCCCTGGCAAAGGATTGGAATGGGT |
| | BI123 VL- | CGCCGTGATTCCCTACTACGGCTCCAACAAGTACTACGCCGACTCCGT |
| | hFc_Knob- | GAAGGGCAGATTCACCATCTCTCGGGACAACTCCAAGAACACCC1GT |
| | 4x4GS- | ACCTGCAGATGAACTCCCTGAGAGCCGAGGACACCGCCGTGrACTAC |
| | TGFbR2 nt | TGTGCCAGAGAGCTGGACTACGGCGATTACGGCCTGGATGTGTGGGG |
| | | CAAGGGCACCACAGTGACAGTTTCTAGCGGAGGCGGAGGATCAGGTG |
| | | GTGGTGGATCAGGCGGCGGTGGTAGTGGTGGCGGTGGTTCTTCTTAC |
| | | GTGCTGACCCAGCCTCCTTCCGTGTCTGTGGCTCCTGGCAAGACCGCC |
| | | AGAATCACCTGTGGCGGCAACAACATCGGCTCCAAGTCCGTGCACTG |
| | | GTATCAGGAGAAGCCAGGCCAGGCTCCTGTGCTGGTGGTGTACGACG |
| | | ACTCCGATAGACCCTCTGGCATCCCTGAGCGGTTCTCCGGCTCTAACT |
| | | CTGGCAACACCGCTACACTGACCATCTCCAGAGTGGAAGCTGGCGAC |
| | | GAGGCCGACTACTACTGCCAAGTGTGGGACTCCTCCTCCGATCACGT |
| | | GGTGTTTGGCGGAGGCACACAGCTGACCGTGCTGGACAAGACCCATA |
| | | CCTGTCCTCCATGTCCTGCTCCAGAGCTGCTCGGAGGCCCTTCTGTGT |
| | | TCCTGTTTCCTCCAAAGCCTAAGGACACCCTGATGATCTCTCGGACCC |
| | | CTGAAGTGACCTGCGTGGTGGTCGATGTGTCTCACGAGGATCCCGAA |
| | | GTGAAGTTCAATTGGTACGTGGACGGCGTGGAAGTGCACAACGCCAA |
| | | GACCAAGCCTAGAGAGGAACAGTACAACTCCACCTACAGAGTGGTGT |
| | | CCGTGCTGACAGTGCTGCACCAGGATTGGCTGAACGGCAAAGAGTAC |
| | | AAGTGCAAGGTGTCCAACAAGGCCCTGCCTGCTCCTATCGAAAAGAC |
| | | CATCAGCAAGGCCAAGGGCCAGCCTAGGGAACCCCAGGTTTACACCC |
| | | TGCCTCCATGCCGGGAAGAGATGACCAAGAACCAGGTGTCCCTGTGG |
| | | TGTCTGGTCAAGGGCTTCTACCCCTCCGATATCGCCGTGGAATGGGAG |
| | | TCTAATGGCCAGCCTGAGAACAACTACAAGACCACACCTCCAGTGCT |
| | | GGACTCCGACGGCTCATTCTTCCTGTACTCCAAGCTGACTGTGGACAA |
| | | GTCCAGATGGCAGCAGGGCAACGTGTTCTCCTGCTCCGTGATGCACG |
| | | AGGCCCTGCACAATCACTACACCCAGAAGTCCCTGTCTCTGTCTCCCG |
| | | GAAAAGGTGGCGGAGGATCTGGCGGAGGCGGAAGTGGCGGTGGrGG |
| | | AAGCGGTGGTGGCGGATCTATTCCTCCACACGTGCAGAAATCCGTGA |
| | | ACAACGACATGATCGTGACCGACAACAATGGCGCCGTGAAGTTCCCT |
| | | CAGCTGTGCAAGTTCTGCGACGTGCGGTTCTCTACCTGCGACAACCAG |
| | | AAATCCTGCATGTCCAACTGCTCCATCACCTCCATCTGCGAGAAGCCC |
| | | CAAGAAGTGTGCGTCGCCGTCTGGCGGAAGAACGACGAGAACATCAC |
| | | CCTGGAAACAGTGTGCCACGATCCTAAGCTGCCCTACCACGACTTCAT |
| | | CCTGGAAGATGCCGCCTCTCCGTGCATCATGAAGGAAAAGAAGA |
| | | AGCCCGGCGAGACTTTCTTCATGTGCAGCTGCTCCTCCGACGAGTGCA |
| | | ACGACAACATCATCTTCTCCGAAGAGTATAACACCAGCAATCCCGAC |
| SEQ ID | aCCR2 Hum1 | GFSFNAYAMN |
| NO: 446 | HCDR1 | |
| SEQ ID | aCCR2 Hum1 | RIRTKNNNYATYYADSVKD |
| NO: 447 | HCDR2 | |
| SEQ ID | aCCR2 Hum1 | FYGNGV |
| NO: 448 | HCDR3 | |
| SEQ ID | aCCR2 Hum1 | EVQLVESGGGLVKPGGSLRLSCAASGFSFNAYAMNWVRQAPGKGLEW |
| NO: 343 | VH aa | VGRIRTKNNNYATYYADSVKDRFTISRDDSKSTLYLQMNSLKTEDTAVY |
| | | YCTTFYGNGVWGQGTTVTVSS |
| SEQ ID | aCCR2 Hum1 | GAAGTGCAGCTGGTTGAATCTGGCGGCGGACTGGTTAAGCCTGGCGG |
| NO: 133 | VH nt | ATCTCTGAGACTGTCTTGTGCCGCCTCCGGCTTCTCCTTCAATGCCIAC |
| | | GCCATGAACTGGGTCCGACAGGCTCCTGGCAAAGGCCTGGAATGGGT |
| | | CGGAAGAATCCGGACCAAGAACAACAACTACGCCACCTACTACGCCG |
| | | ACTCCGTGAAGGACCGGTTCACCATCTCTCGGGACGACTCCAAGAGC |
| | | ACCCTGTACCTGCAGATGAACTCCCTGAAAACCGAGGACACCGCCGT |
| | | GTACTACTGCACCACCTTCTACGGCAATGGCGTGTGGGGCCAGGGCA |
| | | CAACAGTGACAGTCTCTTCC |
| SEQ ID | aCCR2 Hum1 | EVQLVESGGGLVKPGGSLRLSCAASGFSFNAYAMNWVRQAPGKGLEW |
| NO: 131 | VH-hCH1- | VGRIRTKNNNYATYYADSVKDRFTISRDDSKSTLYLQMNSLKTEDTAVY |
| | hFc_Hole- | YCTTFYGNGVWGQGTTVTVSSASTKGPSVFPLAPSSKSTSGGTAALGCL |
| | 4x4GS- | VKDYFPEPVTVSWNSGALTSGVHTFPAVLQSSGLYSLSSVVTVPSSSLGT |
| | TGFbR2 aa | QTYICNVNHKPSNTKVDKRVEPKSCDKTHTCPPCPAPELLGGPSVFLFPP |
| | | KPKDTLMISRTPEVTCVVVDVSHEDPEVKFNWYVDGVEVHNAKTKPRE |
| | | EQYNSTYRVVSVLTVLHQDWLNGKEYKCKVSNKALPAPIEKTISKAKGQ |
| | | PREPQVCTLPPSREEMTKNQVSLSCAVKGFYPSDIAVEWESNGQPENNY |
| | | KTTPPVLDSDGSFFLVSKLTVDKSRWQQGNVFSCVMHEALHNHYTQK |
| | | SLSLSPGKGGGGSGGGGSGGGGSGGGGSIPPHVQKSVNNDMIVTDNNGA |
| | | VKFPQLCKFCDVRFSTCDNQKSCMSNCSITSICEKPQEVCVAVWRKNDE |
| | | NITLETVCHDPKLPYHDFILEDAASPKCIMKEKKKPGETFFMCSCSSDEC |
| | | NDNIIFSEEYNTSNPD |
| SEQ ID | aCCR2 Hum1 | GAAGTGCAGCTGGTTGAATCTGGCGGCGGACTGGTTAAGCCTGGCGG |
| NO: 132 | VH-hCH1- | ATCTCTGAGACTGTCTTGTGCCGCCTCCGGCTTCTCCTTCAATGCCTAC |
| | hFc_Hole- | GCCATGAACTGGGTCCGACAGGCTCCTGGCAAAGGCCTGGAATGGGT |
| | 4x4GS- | CGGAAGAATCCGGACCAAGAACAACAACTACGCCACCTACTACGCCG |
| | TGFbR2 nt | ACTCCGTGAAGGACCGGTTCACCATCTCTCGGGACGACTCCAAGAGC |
| | | ACCCTGTACCTGCAGATGAACTCCCTGAAAACCGAGGACACCGCCGT |
| | | GTACTACTGCACCACCTTCTACGGCAATGGCGTGTGGGGCCAGGGCA |
| | | CAACAGTGACAGTCTCTTCCGCCTCCACCAAGGGACCCTCTGTGTTTC |
| | | CTCTGGCTCCCTCCAGCAAGTCTACCTCTGGTGGAACAGCTGCCCTGG |
| | | GCTGCCTGGTCAAGGATTACTTTCCTGAGCCTGTGACCGTGTCCTGGA |
| | | ACTCTGGCGCTCTGACATCTGGCGTGAGACCTTTCCAGCTGTGCTGC |
| | | AGTCCTCCGGCCTGTACTCTCTGTCCTCTGTCGTGACCGTGCCTTCCA |
| | | GCTCTCTGGGCACCCAGACCTACATCTGCAATGTGAACCACAAGCCTT |
| | | CCAACACCAAGGTGGACAAGAGAGTGGAACCCAAGTCCTGCGACAA |
| | | GACCCACACCTGTCCTCCATGTCCTGCTCCAGAACTGCTCGGCGGACC |
| | | TTCCGTGTTCCTGTTTCCTCCAAAGCCTAAGGACACCCTGATGATCTC |
| | | TCGGACCCCTGAAGTGACCTGCGTGGTGGTGGATGTGTCTCACGAGG |
| | | ATCCCGAAGTGAAGTTCAATTGGTACGTGGACGGCGTGGAAGTGCAC |
| | | AACGCCAAGACCAAGCCTAGAGAGGAACAGTACAACTCCACCTACA |
| | | GAGTGGTGTCCGTGCTGACCGTGCTGCACCAGGATTGGCTGAACGGC |
| | | AAAGAGTACAAGTGCAAGGTGTCCAACAAGGCCCTGCCTGCTCCTAT |
| | | CGAAAAGACCATCTCCAAGGCCAAGGGCCAGCCTCGGGAACCTCAAG |
| | | TCTGTACCCTGCCTCCTACTCCGGGAAGAGATGACCAAGAATCAGGTG |
| | | TCCCTGTCCTGCGCCGTGAAGGGCTTCTACCCTTCTGATATCGCCGTG |
| | | GAATGGGAGAGCAACGGCCAGCCTGAGAACAACTACAAGACAACCC |
| | | CTCCTGTGCTGGACTCCGACGGCTCATTCTTCCTGGTGTCCAAGCTGA |
| | | CAGTGGACAAGTCCAGATGGCAGCAGGGCAACGTGTTCTCCTGCTCC |
| | | GTGATGCACGAGGCCCTGCACAATCACTACACCCAGAAGTCCCTGTC |
| | | TCTGAGCCCAGGCAAAGGTGGCGGAGGATCTGGCGGAGGTGGTAGC |
| | | GGCGGAGGCGGATCAGGCGGTGGTGGCTCTATTCCTCCACACGTGCA |
| | | GAAATCCGTGAACAACGACATGATCGTGACCGACAACAACGGCGCTG |
| | | TGAAGTTCCCTCAGCTGTGCAAGTTCTGCGACGTGCGGTTCTCCACCT |
| | | GTGACAACCAGAAATCCTGCATGTCCAACTGCTCCATCACCTCCATCT |
| | | GCGAGAAGCCCCAAGAAGTGTGCGTCGCCGTCTGGCGGAAGAACGA |
| | | CGAGAACATCACCCTGGAAACCGTGTGCCACGATCCTAAGCTGCCCT |
| | | ACCACGACTTCATCCTGGAAGATGCCGCCTCTCCTAAGTGCATCATGA |
| | | AGGAAAAGAAGAAGCCCGGCGAGACTTTCTTCATGTGCAGCTGCTCC |
| | | TCCGACGAGTGCAACGACAACATCATCTTCTCCGAAGAGTATAACAC |
| | | CAGCAATCCCGAC |
| SEQ ID | aCCR2 VL | KSSQSLLDSDGKTFLN |
| NO: 454 | LCDR1 | |
| SEQ ID | aCCR2 VL | LVSKLDS |
| NO: 455 | LCDR2 | |
| SEQ ID | aCCR2 VL | WQGTHFPYT |
| NO: 456 | LCDR3 | |
| SEQ ID | aCCR2 VL aa | DVVMTQSPLSLPVTLGQPASISCKSSQSLLDSDGKTFLNWLQQRPGQSPR |
| NO: 345 | | RLIYLVSKLDSGVPDRFSGSGSGTDFTLKISRVEAEDVGVYYCWQGTHFP |
| | | YTFGGGTKVEIK |
| SEQ ID | aCCR2 VL nt | GACGTCGTCATGACCCAATCCCCGCTCTCCCTGCCGGTGACTCTCGGC |
| NO: 272 | | CAGCCGGCGTCCATCTCGTGCAAGTCCTCCCAATCCCTGCTGGATTCG |
| | | GATGGGAAGACTTTCCTGAACTGGCTGCAGCAACGGCCCGGCCAGTC |
| | | GCCACGGCGGCTGATCTACCTGGTGTCCAAGCTGGATTCAGGTGTGC |
| | | CTGATAGATTCTCCGGCAGCGGATCGGGGACCGACTTCACGCTGAAG |
| | | ATCTCCAGAGTGGAAGCAGAGGACGTGGGCGTCTATTACTGTTGGCA |
| | | GGGGACTCATTTCCCCTATACCTTTGGAGGTGGTACTAAGGTGGAAAT |
| | | TAAG |
| SEQ ID | aCCR2 VL- | DVVMTQSPLSLPVTLGQPASISCKSSQSLLDSDGKTFLNWLQQRPGQSPR |
| NO: 373 | hCLIg_vk aa | RLIYLVSKLDSGVPDRFSGSGSGTDFTLKISRVEAEDVGVYYCWQTHFP |
| | | YTFGGGTKVEIKFTVAAPSVFIFPPSDEQLKSGTASVVCLLNNFYPREAK |
| | | VQWKVDNALQSGNSQESVTEQDSKDSTYSLSSTLTLSKADYEKHKVYA |
| | | CEVTHQGLSSPVTKSFNRGEC |
| SEQ ID | aCCR2 VL- | GACGTCGTCATGACCCAATCCCCGCTCTCCCTGCCGGTGACTCTCGGC |
| NO: 134 | hCLIg_vk nt | CAGCCGGCGTCCATCTCGTGCAAGTCCTCCCAATCCCTGCTGGATTCG |
| | | GATGGGAAGACTTTCCTGAACTGGCTGCAGCAACGGCCCGGCCAGTC |
| | | GCCACGGCGGCTGATCTACCTGGTGTCCAAGCTGGATTCAGGTGTGC |
| | | CTGATAGATTCTCCGGCAGCGGATCGGGGACCGACTTCACGCTGAAG |
| | | ATCTCCAGAGTGGAAGCAGAGGACGTGGGCGTCTATTACTGTTGGCA |
| | | GGGGACTCATTTCCCCTATACCTTTGGAGGTGGTACTAAGGTGGAAAT |
| | | TAAGAGAACAGTGGCCGCTCCTTCCGTGTTCATCTTCCCACCCTCCGA |
| | | CGAGCAGCTGAAGTCCGGCACCGCTTCTGTCGTGTGCCTGCTCAACA |
| | | ACTTCTACCCTCGGGAAGCCAAGGTGCAGTGGAAGGTGGACAACGCC |
| | | CTGCAGTCCGGCAACTCCCAGGAATCCGTCACCGAGCAGGACTCCAA |
| | | GGACAGCACCTACTCCCTGTCCTCCACCCTGACCCTGTCCAAGGCCGA |
| | | CTACGAGAAGCACAAGGTGTACGCCTGCGAAGTGACCCACCAGGGCC |
| | | TGAGCAGCCCCGTGACCAAGTCCTTCAACCGGGGCGAGTGC |

### Additional Multispecific Antibody Molecules Targeting CSF1R

[0391] In one aspect, disclosed herein is a multispecific antibody molecule comprising a CSF1R binding moiety. In some embodiments, the CSF1R binding moiety comprises an anti-CSF1R antibody molecule. Exemplary anti-CSF1R antibody molecule sequences are described in WO2009026303A1; WO2011123381A1; WO2016207312A1; WO2016106180A1; US20160220669A1; US20160326254A1; WO2013169264A1; WO2013087699A1; WO2011140249A2; WO2011131407A1; WO2011123381A1; WO2011107553A1; and WO2011070024A1, all of which are herein incorporated by reference in their entirety. In some embodiments, the CSF1R binding moiety comprises the CDR (e.g., one, two, three, four, five, or all six CDRs), VH, VL, heavy chain, or light chain sequences of emactuzumab, or a sequence substantially identical thereto (e.g., at least 95% identical thereto, e.g., 95% to 99.9% identical thereto, or having at least one amino acid alteration, but not more than five, ten or fifteen alterations (e.g., substitutions, deletions, or insertions, e.g., conservative substitutions)). In some embodiments, the CSF1R binding moiety comprises the CDR (e.g., one, two, three, four, five, or all six CDRs), VH, VL, heavy chain, or light chain sequences of cabiralizumab, or a sequence substantially identical thereto (e.g., at least 95% identical thereto, e.g., 95% to 99.9% identical thereto, or having at least one amino acid alteration, but not more than five, ten or fifteen alterations (e.g., substitutions, deletions, or insertions, e.g., conservative substitutions)). In some embodiments, the CSF1R binding moiety comprises the CDR (e.g., one, two, three, four, five, or all six CDRs), VH, VL, heavy chain, or light chain sequences of AMG820, or a sequence substantially identical thereto (e.g., at least 95% identical thereto, e.g., 95% to 99.9% identical thereto, or having at least one amino acid alteration, but not more than five, ten or fifteen alterations (e.g., substitutions, deletions, or insertions, e.g., conservative substitutions)). In some embodiments, the CSF1R binding moiety comprises the CDR (e.g., one, two, three, four, five, or all six CDRs), VH, VL, heavy chain, or light chain sequences of IMC-CS4, or a sequence substantially identical thereto (e.g., at least 95% identical thereto, e.g., 95% to 99.9% identical thereto, or having at least one amino acid alteration, but not more than five, ten or fifteen alterations (e.g., substitutions, deletions, or insertions, e.g., conservative substitutions)). In some embodiments, the CSF1R binding moiety comprises a VH or VL amino acid sequence disclosed in Table 8, a CDR of a VH or VL amino acid sequence disclosed in Table 8, or a sequence substantially identical thereto.

TABLE 8
Exemplary anti-CSF1R antibody molecule sequences

| SEQ ID | | |
|---|---|---|
| NO | Description | Sequence |
| SEQ ID | αmCSF1R VH | QVQLQQSGAELVKPGSSVKISCKASGYTFTSNFMHWIKQQPGNGLEWIG |
| NO: 48 | | WIYPGDGDTEYNQKFNGKATLTADKSSSTAYMQLSSLTSEDSAVYFCA |
| | | VNYGGYVLDAWGQGASVTVSS |
| SEQ ID | αmCSF1R VL | EIVLTQSPTTMAASPGEKVTITCRASSSTNYMSWYQQKSGASPKPWIYET |
| NO: 50 | | SKLASGVPDRFSGSGSGTSYSFTISSME1EDAATYYCHQWSSTPLTFGSG |
| | | TKLEIK |
| SEQ ID | αhCSF1R | QVQLVQSGAEVKKPGASVKVSCKASGYTFTSYDISWVRQAPGQGLEW |
| NO: 66 | emactuzumab | MGVIWTDGGTNYAQKLQGRVTMTTDTSTSTAYMELRSLRSDDTAVYY |
| | VH | CARDQRLYFDVWGQGTTVTVSS |
| SEQ ID | αhCSF1R | DIQMTQSPSSLSASVGDRVTITCRASEDVNTYVSWYQQKPGKAPKLLIY |
| NO: 67 | emactuzumab | AASNRYTGVPSRFSGSGSGTDFTLTISSLQPEDFATYYCQQSFSYPTFGQG |
| | VL | TKLEIK |
| SEQ ID | αhCSF1R | QVQLVQSGAEVKKPGSSVKVSCKASGYTFTDNYMIWVRQAPGQGLEW |
| NO: 69 | cabiralizumab | MGDINPYNGGTTFNQKFKGRVTITADKSTSTAYMELSSLRSEDTAVYYC |
| | VH | ARESPYFSNLYVMDYWGQGTLVTVSS |
| SEQ ID | αhCSF1R | EIVLTQSPATLSLSPGERATLSCKASQSVDYDGDNYMNWYQQKPGQAP |
| NO: 70 | cabiralizumab | RLLIYAASNLESGIPARFSGSGSGTDFTLTISSLEPEDFAVYYCHLSNEDLS |
| | VL | TFGGGTKVEIK |

### Additional Multispecific Antibody Molecules Targeting CCR2

[0392] In one aspect, disclosed herein is a multispecific antibody molecule comprising a CCR2 binding moiety. Exemplary CCR2 antibodies are described herein as well as in WO2013192596A2; WO2010021697A2; WO2001057226A1; and WO1997031949A1, all of which are herein incorporated by reference in their entirety. In some embodiments, the CCR2 binding moiety comprises the CDR (e.g., one, two, three, four, five, or all six CDRs), VH, VL, heavy chain, or light chain sequences of plozalizumab, or a sequence substantially identical thereto (e.g., 950% to 99.900 identical thereto, or having at least one amino acid alteration, but not more than five, ten or fifteen alterations (e.g., substitutions, deletions, or insertions, e.g., conservative substitutions)). In some embodiments, the CCR2 binding moiety comprises a VH or VL amino acid sequence disclosed in Table 9, a CDR of a VH or VL amino acid sequence disclosed in Table 9, or a sequence substantially identical thereto.

TABLE 9
Exemplary anti-CCR2 antibody molecule sequences

| SEQ ID | | |
|---|---|---|
| NO | Description | Sequence |
| SEQ ID | αCCR2 MC12 | QVQLQESGPGLVQPSQTLSLTCTVSGFSLTDFSVHWVRQPPGKGLEWM |
| NO: 44 | VH | GRIRSEGNTDYNSALKSRLSISRDTSKSQVFLKMNSLQTEDTAIYFCTRG |
| | | DILGFGYWGQGVMVTVSS |
| SEQ ID | αCCR2 MC12 | DIVMTQSPLSVSVTPGESASISCRSSKSLLHFKGITFVYWYLQKPGQSPQL |
| NO: 45 | VL | LIFRMSSLASGVPDRFSGSGSETDFTLKISRVEAEDVGTYYCGQLLENPY |
| | | TFGAGTKLELK |
| SEQ ID | αhCCR2 | EVQLVESGGGLVKPGGSLRLSCAASGFTFSAYAMNWVRQAPGKGLEW |
| NO: 54 | plozalizumab | VGRIRTKNNNYATYYADSVKDRFTISRDDSKNTLYLQMNSLK1EDTAV |
| | VH | YYCTTFYGNGVWGQGTLVTVSS |
| SEQ ID | αhCCR2 | DVVMTQSPLSLPVTLGQPASISCKSSQSLLDSDGKTFLNWFQQRPGQSPR |
| NO: 57 | plozalizumab | RLIYLVSKLDSGVPDRFSGSGSGTDFTLKISRVEAEDVGVYYCWQGTHFP |
| | VL | YTFGQGTRLEIK |
| SEQ ID | αhCCR2 D1 | EVQLVQSGAEVKKPGASVKVSCKASGYTFTGYHMHWVRQAPGQGLEW |
| NO: 59 | VH | MGWINPNSGVTKYAQKFQGRVTMTRDTSINTAYMELSRLRFDDTDVYY |
| | | CATGGFGYWGEGTLVTVSS |
| SEQ ID | αhCCR2 D1 | LPVLTQPPSVSKGLRQTATLTCTGNSNNVGNQGAAWLQQHQGQPPKLL |
| NO: 60 | VL | SYRNHNRPSGVSERFSPSRSGDTSSLTITGLQPEDEADYYCLAWDSSLRA |
| | | FVFGTGTKLTVL |
| SEQ ID | αhCCR2 42G7 | QVQLVQSGAEVKKPGASVKVSCKASGYTFSSYYMHWVRQAPGQGLEW |
| NO: 62 | VH | MGIINPSGGNTSYAQKFQGRVTMTRDTSTSTVYMELSSLRSEDTAVYYC |
| | | ARGGYQLPHGRARAFDMWGQGTMVTVSS |
| SEQ ID | αhCCR2 42G7 | AIRMTQSPLSLPVTLGQPASISCTSSQSLVYRDGTTYLNWFQQRPGQSPR |
| NO: 63 | VL | RLIYKVSNRDSGVPDRFTGSGSGTTFTLTISRVEAEDVGIYYCMQGTHWP |
| | | LTFGQGTKVEIK |
| SEQ ID | αhCCR2 43G12 | EVQLVESGGGLVQPGGSLRLSCVASGFTFSDYWMSWVRQAPGKGLEW |
| NO: 64 | VH | VANIKKDGSVNYYVDSVKGRFTISRDNAKNSLYLQMNSLRAEDTAVYY |
| | | CTRFDYWGQGTLVTVSS |
| SEQ ID | αhCCR2 43G12 | QAGLTQPPSVSKGLRQTATLTCTGNSNNVGNQGAAWLQQHQGHPPKLL |
| NO: 65 | VL | FYRNNNRASGISERLSASRSGNTASLTITGLQPEDEADYYCLTWDSSLSV |
| | | VVFGGGTKLTVL |

### Additional Multispecific Antibody Molecules Targeting PD-L1

[0393] In one aspect, disclosed herein is a multispecific antibody molecule comprising a PD-L1 binding moiety. In some embodiments, the PD-L1 binding moiety comprises an anti-PD-L1 antibody molecule. Exemplary anti-PD-L1 antibody molecule sequences are described in WO2013079174, WO 2010077634, WO2007/005874, and US20120039906, all of which are herein incorporated by reference in their entirety. In some embodiments, the PD-L1 binding moiety comprises the CDR (e.g., one, two, three, four, five, or all six CDRs), VH, VL, heavy chain, or light chain sequences of durvalumab, or a sequence substantially identical thereto (e.g., 950% to 99.900 identical thereto, or having at least one amino acid alteration, but not more than five, ten or fifteen alterations (e.g., substitutions, deletions, or insertions, e.g., conservative substitutions)). In some embodiments, the PD-L1 binding moiety comprises the CDR (e.g., one, two, three, four, five, or all six CDRs), VH, VL, heavy chain, or light chain sequences of atezolizumab, or a sequence substantially identical thereto (e.g., at least 950% identical thereto, e.g., 9500 to 99.900 identical thereto, or having at least one amino acid alteration, but not more than five, ten or fifteen alterations (e.g., substitutions, deletions, or insertions, e.g., conservative substitutions)). In some embodiments, the PD-L1 binding moiety comprises the CDR (e.g., one, two, three, four, five, or all six CDRs), VH, VL, heavy chain, or light chain sequences of avelumab, or a sequence substantially identical thereto (e.g., at least 95% identical thereto, e.g., 95% to 99.9% identical thereto, or having at least one amino acid alteration, but not more than five, ten or fifteen alterations (e.g., substitutions, deletions, or insertions, e.g., conservative substitutions)). In some embodiments, the PD-L1 binding moiety comprises a VH or VL amino acid sequence disclosed in Table 10, a CDR of a VH or VL amino acid sequence disclosed in Table 10, or a sequence substantially identical thereto.

TABLE 10
Exemplary anti-PD-L1 antibody molecule sequences

| SEQ ID | | |
|---|---|---|
| NO | Description | Sequence |
| SEQ ID | αPD-L1 | EVQLVESGGGLVQPGGSLRLSCAASGFTFSRYWMSWVRQAPGKGLEW |
| NO: 109 | durvalumab VH | VANIKQDGSEKYYVDSVKGRFTISRDNAKNSLYLQMNSLRAEDTAVY |
| | | YCAREGGWFGELAFDYWGQGTLVTVSS |
| SEQ ID | αPD-L1 | EIVLTQSPGTLSLSPGERATLSCRASQRVSSSYLAWYQQKPGQAPRLLIY |
| NO: 110 | durvalumab VL | DASSRATGIPDRFSGSGSGTDFTLTISRLEPEDFAVYYCQQYGSLPWTFG |
| | | QGTKVEIK |
| SEQ ID | αPD-L1 | EVQLVESGGGLVQPGGSLRLSCAASGFTFSDSWIHWVRQAPGKGLEW |
| NO: 111 | atezolizumab | VAWISPYGGSTYYADSVKGRFTISADTSKNTAYLQMNSLRAEDTAVYY |
| | VH | CARRHWPGGFDYWGQGTLVTVSS |
| SEQ ID | αPD-L1 | DIQMTQSPSSLSASVGDRVTITCRASQDVSTAVAWYQQKPGKAPKLLIY |
| NO: 112 | atezolizumab | SASFLYSGVPSRFSGSGSGTDFTLTISSLQPEDFATYYCQQYLYHPATFG |
| | VL | QGTKVEIK |
| SEQ ID | αPD-L1 | EVQLLESGGGLVQPGGSLRLSCAASGFTFSSYIMMWVRQAPGKGLEW |
| NO: 113 | avelumab VH | VSSIYPSGGITFYADTVKGRFTISRDNSKNTLYLQMNSLRAEDTAVYYC |
| | | ARIKLGTVTTVDYWGQGTLVTVSS |
| SEQ ID | αPD-L1 | QSALTQPASVSGSPGQSITISCTGTSSDVGGYNYVSWYQQHPGKAPKL |
| NO: 114 | avelumab VL | MIYDVSNRPSGVSNRFSGSKSGNTASLTISGLQAEDEADYYCSSYTSSST |
| | | RVFGTGTKVTVL |

### CDR-Grafted Scaffolds

[0394] In embodiments, the antibody molecule is a CDR-grafted scaffold domain. In embodiments, the scaffold domain is based on a fibronectin domain, e.g., fibronectin type III domain. The overall fold of the fibronectin type III (Fn3) domain is closely related to that of the smallest functional antibody fragment, the variable region of the antibody heavy chain. There are three loops at the end of Fn3; the positions of BC, DE and FG loops approximately correspond to those of CDR1, 2 and 3 of the VH domain of an antibody. Fn3 does not have disulfide bonds; and therefore Fn3 is stable under reducing conditions, unlike antibodies and their fragments (see, e.g., WO 98/56915; WO 01/64942; WO 00/34784). An Fn3 domain can be modified (e.g., using CDRs or hypervariable loops described herein) or varied, e.g., to select domains that bind to an antigen/marker/cell described herein.

[0395] In embodiments, a scaffold domain, e.g., a folded domain, is based on an antibody, e.g., a “minibody” scaffold created by deleting three beta strands from a heavy chain variable region of a monoclonal antibody (see, e.g., Tramontano et al., 1994, J Mol. Recognit. 7:9; and Martin et al., 1994, EMBO J. 13:5303-5309). The “minibody” can be used to present two hypervariable loops. In embodiments, the scaffold domain is a V-like domain (see, e.g., Coia et al. WO 99/45110) or a domain derived from tendamistatin, which is a 74 residue, six-strand beta sheet sandwich held together by two disulfide bonds (see, e.g., McConnell and Hoess, 1995, J Mol. Biol. 250:460). For example, the loops of tendamistatin can be modified (e.g., using CDRs or hypervariable loops) or varied, e.g., to select domains that bind to a marker/antigen/cell described herein. Another exemplary scaffold domain is a beta-sandwich structure derived from the extracellular domain of CTLA-4 (see, e.g., WO 00/60070).

[0396] Other exemplary scaffold domains include but are not limited to T-cell receptors; MHC proteins; extracellular domains (e.g., fibronectin Type III repeats, EGF repeats); protease inhibitors (e.g., Kunitz domains, ecotin, BPTI, and so forth); TPR repeats; trifoil structures; zinc finger domains; DNA-binding proteins; particularly monomeric DNA binding proteins; RNA binding proteins; enzymes, e.g., proteases (particularly inactivated proteases), RNase; chaperones, e.g., thioredoxin, and heat shock proteins; and intracellular signaling domains (such as SH2 and SH3 domains). See, e.g., US 20040009530 and U.S. Pat. No. 7,501,121, incorporated herein by reference.

[0397] In embodiments, a scaffold domain is evaluated and chosen, e.g., by one or more of the following criteria: (1) amino acid sequence, (2) sequences of several homologous domains, (3) 3-dimensional structure, and/or (4) stability data over a range of pH, temperature, salinity, organic solvent, oxidant concentration. In embodiments, the scaffold domain is a small, stable protein domain, e.g., a protein of less than 100, 70, 50, 40 or 30 amino acids. The domain may include one or more disulfide bonds or may chelate a metal, e.g., zinc.

[0398] Exemplary structures of the multifunctional molecules defined herein are described below. Exemplary structures are further described in: Weidle U et al. (2013) The Intriguing Options of Multispecific Antibody Formats for Treatment of Cancer. Cancer Genomics & Proteomics 10: 1-18 (2013); and Spiess C et al. (2015) Alternative molecular formats and therapeutic applications for bispecific antibodies. Molecular Immunology 67: 95-106; the full contents of each of which is incorporated by reference herein).

### Heterodimerized Antibody Molecules

[0399] Heterodimerized bispecific antibodies are based on the natural IgG structure, wherein the two binding arms recognize different antigens. IgG derived formats that enable defined monovalent (and simultaneous) antigen binding are generated by forced heavy chain heterodimerization, combined with technologies that minimize light chain mispairing (e.g., common light chain). Forced heavy chain heterodimerization can be obtained using, e.g., knob-in-hole OR strand exchange engineered domains (SEED).

### Knob-In-Hole

[0400] Knob-in-Hole as described in U.S. Pat. Nos. 5,731,116, 7,476,724 and Ridgway, J. et al. (1996) Prot. Engineering 9(7): 617-621, broadly involves: (1) mutating the CH3 domain of one or both antibodies to promote heterodimerization; and (2) combining the mutated antibodies under conditions that promote heterodimerization. “Knobs” or “protuberances” are typically created by replacing a small amino acid in a parental antibody with a larger amino acid (e.g., T366Y or T366W); “Holes” or “cavities” are created by replacing a larger residue in a parental antibody with a smaller amino acid (e.g., Y407T, T366S, L368A and/or Y407V), numbered based on the Eu numbering system.

### Strand Exchange Engineered Domains (SEED)

[0401] SEED is based on sequence exchanges between IgG1 and IgA to create non-identical chains which heterodimerize preferentially. Alternating sequences from human IgA and IgG in the SEED CH3 domains generate two asymmetric but complementary domains, designated AG and GA. The SEED design allows efficient generation of AG/GA heterodimers, while disfavoring homodimerization of AG and GA SEED CH3 domains.

### Common Light Chain & CrossMab

[0402] Light chain mispairing must be avoided to generate homogenous preparations of bispecific IgGs. One way to achieve this is through the use of the common light chain principle, i.e. combining two binders that share one light chain but still have separate specificities. Another option is the CrossMab technology which avoids non-specific L chain mispairing by exchanging CH1 and CL domains in the Fab of one half of the bispecific antibody. Such crossover variants retain binding specificity and affinity, but make the two arms so different that L chain mispairing is prevented.

### Antibody-Based Fusions

[0403] A variety of formats can be generated which contain additional binding entities attached to the N or C terminus of antibodies. These fusions with single chain or disulfide stabilized Fvs or Fabs result in the generation of tetravalent molecules with bivalent binding specificity for each antigen. Combinations of scFvs and scFabs with IgGs enable the production of molecules which can recognize three or more different antigens.

### Antibody-Fab Fusion

[0404] Antibody-Fab fusions are bispecific antibodies comprising a traditional antibody to a first target and a Fab to a second target fused to the C terminus of the antibody heavy chain. Commonly the antibody and the Fab will have a common light chain. Antibody fusions can be produced by (1) engineering the DNA sequence of the target fusion, and (2) transfecting the target DNA into a suitable host cell to express the fusion protein. It seems like the antibody-scFv fusion may be linked by a (Gly)-Ser linker between the C-terminus of the CH3 domain and the N-terminus of the scFv, as described by Coloma, J. et al. (1997) Nature Biotech 15:159.

### Antibody-scFv Fusion

[0405] Antibody-scFv Fusions are bispecific antibodies comprising a traditional antibody and a scFv of unique specificity fused to the C terminus of the antibody heavy chain. The scFv can be fused to the C terminus through the Heavy Chain of the scFv either directly or through a linker peptide. Antibody fusions can be produced by (1) engineering the DNA sequence of the target fusion, and (2) transfecting the target DNA into a suitable host cell to express the fusion protein. It seems like the antibody-scFv fusion may be linked by a (Gly)-Ser linker between the C-terminus of the CH3 domain and the N-terminus of the scFv, as described by Coloma, J. et al. (1997) Nature Biotech 15:159.

### Variable Domain Immunoglobulin DVD

[0406] A related format is the dual variable domain immunoglobulin (DVD), which are composed of VH and VL domains of a second specificity place upon the N termini of the V domains by shorter linker sequences.

### Fc-Containing Entities (Mini-Antibodies)

[0407] Fc-containing entities, also known as mini-antibodies, can be generated by fusing scFv to the C-termini of constant heavy region domain 3 (CH3-scFv) and/or to the hinge region (scFv-hinge-Fc) of an antibody with a different specificity. Trivalent entities can also be made which have disulfide stabilized variable regions (without peptide linker) fused to the C-terminus of CH3 domains of IgGs.

### Fc-Less Bispecifics

[0408] Fc-less bispecifics are characterized by generally having smaller size than Fc-containing entities. Common bispecific of this class include Fab-scFv2 and Fab-scFv molecules. This class also includes, e.g., BiTEs (bispecific T-cell engagers), diabodies, TandAbs (tetravalent tandem antibodies), and DARTs (dual affinity retargeting molecules). BiTEs are created by fusing two scFvs via a flexible linker peptide. Diabodies consist of two VH and two VL domains from two different antibodies. Interaction only with complementary domains on another chain is achieved by attaching domains with short linker peptides which permits pairing only with VH and VL domains. VH of the first binder linked to the VL of the second binder is co-expressed with the VH of the second antibody linked to VL of the first antibody. TandAbs molecules are generated by functional dimerization of a protein consisting of four antibody variable H- and L-chains in an orientation that prevents intramolecular pairing. DARTs are entities that are stabilized by disulfide bonds which apply a similar design concept to that of diabodies.

### Kappa/Lambda Formats

[0409] Multispecific molecules (e.g., multispecific antibody molecules) that include the lambda light chain polypeptide and a kappa light chain polypeptides, can be used to allow for heterodimerization. Methods for generating bispecific antibody molecules comprising the lambda light chain polypeptide and a kappa light chain polypeptides are disclosed in PCT/US2017/53053 filed on Sep. 22, 2017, incorporated herein by reference in its entirety.

[0410] In embodiments, the multispecific molecules include a multispecific antibody molecule, e.g., an antibody molecule comprising two binding specificities, e.g., a bispecific antibody molecule. The multispecific antibody molecule includes:

[0411] a lambda light chain polypeptide 1 (LLCP1) specific for a first epitope;

[0412] a heavy chain polypeptide 1 (HCP1) specific for the first epitope;

[0413] a kappa light chain polypeptide 2 (KLCP2) specific for a second epitope; and

[0414] a heavy chain polypeptide 2 (HCP2) specific for the second epitope.

[0415] “Lambda light chain polypeptide 1 (LLCP1)”, as that term is used herein, refers to a polypeptide comprising sufficient light chain (LC) sequence, such that when combined with a cognate heavy chain variable region, can mediate specific binding to its epitope and complex with an HCP1. In an embodiment it comprises all or a fragment of a CH1 region. In an embodiment, an LLCP1 comprises LC-CDR1, LC-CDR2, LC-CDR3, FR1, FR2, FR3, FR4, and CH1, or sufficient sequence therefrom to mediate specific binding of its epitope and complex with an HCP1. LLCP1, together with its HCP1, provide specificity for a first epitope (while KLCP2, together with its HCP2, provide specificity for a second epitope). As described elsewhere herein, LLCP1 has a higher affinity for HCP1 than for HCP2.

[0416] “Kappa light chain polypeptide 2 (KLCP2)”, as that term is used herein, refers to a polypeptide comprising sufficient light chain (LC) sequence, such that when combined with a cognate heavy chain variable region, can mediate specific binding to its epitope and complex with an HCP2. In an embodiments it comprises all or a fragment of a CH1 region. In an embodiment, a KLCP2 comprises LC-CDR1, LC-CDR2, LC-CDR3, FR1, FR2, FR3, FR4, and CH1, or sufficient sequence therefrom to mediate specific binding of its epitope and complex with an HCP2. KLCP2, together with its HCP2, provide specificity for a second epitope (while LLCP1, together with its HCP1, provide specificity for a first epitope).

[0417] “Heavy chain polypeptide 1 (HCP1)”, as that term is used herein, refers to a polypeptide comprising sufficient heavy chain (HC) sequence, e.g., HC variable region sequence, such that when combined with a cognate LLCP1, can mediate specific binding to its epitope and complex with an HCP1. In an embodiments it comprises all or a fragment of a CH1 region. In an embodiment, it comprises all or a fragment of a CH2 and/or CH3 region. In an embodiment an HCP1 comprises HC-CDR1, HC-CDR2, HC-CDR3, FR1, FR2, FR3, FR4, CH1, CH2, and CH3, or sufficient sequence therefrom to: (i) mediate specific binding of its epitope and complex with an LLCP1, (ii) to complex preferentially, as described herein to LLCP1 as opposed to KLCP2; and (iii) to complex preferentially, as described herein, to an HCP2, as opposed to another molecule of HCP1. HCP1, together with its LLCP1, provide specificity for a first epitope (while KLCP2, together with its HCP2, provide specificity for a second epitope).

[0418] “Heavy chain polypeptide 2 (HCP2)”, as that term is used herein, refers to a polypeptide comprising sufficient heavy chain (HC) sequence, e.g., HC variable region sequence, such that when combined with a cognate LLCP1, can mediate specific binding to its epitope and complex with an HCP1. In an embodiments it comprises all or a fragment of a CH1 region. In an embodiments it comprises all or a fragment of a CH2 and/or CH3 region. In an embodiment an HCP1 comprises HC-CDR1, HC-CDR2, HC-CDR3, FR1, FR2, FR3, FR4, CH1, CH2, and CH3, or sufficient sequence therefrom to: (i) mediate specific binding of its epitope and complex with an KLCP2, (ii) to complex preferentially, as described herein to KLCP2 as opposed to LLCP1; and (iii) to complex preferentially, as described herein, to an HCP1, as opposed to another molecule of HCP2. HCP2, together with its KLCP2, provide specificity for a second epitope (while LLCP1, together with its HCP1, provide specificity for a first epitope).

[0419] In some embodiments of the multispecific antibody molecule disclosed herein:

[0420] LLCP1 has a higher affinity for HCP1 than for HCP2; and/or

[0421] KLCP2 has a higher affinity for HCP2 than for HCP1.

[0422] In embodiments, the affinity of LLCP1 for HCP1 is sufficiently greater than its affinity for HCP2, such that under preselected conditions, e.g., in aqueous buffer, e.g., at pH 7, in saline, e.g., at pH 7, or under physiological conditions, at least 75%, 80, 90, 95, 98, 99, 99.5, or 99.9% of the multispecific antibody molecule molecules have a LLCP1 complexed, or interfaced with, a HCP1.

[0423] In some embodiments of the multispecific antibody molecule disclosed herein:

[0424] the HCP1 has a greater affinity for HCP2, than for a second molecule of HCP1; and/or

[0425] the HCP2 has a greater affinity for HCP1, than for a second molecule of HCP2.

[0426] In embodiments, the affinity of HCP1 for HCP2 is sufficiently greater than its affinity for a second molecule of HCP1, such that under preselected conditions, e.g., in aqueous buffer, e.g., at pH 7, in saline, e.g., at pH 7, or under physiological conditions, at least 75%, 80, 90, 95, 98, 99 99.5 or 99.9% of the multispecific antibody molecule molecules have a HCP1 complexed, or interfaced with, a HCP2.

[0427] In another aspect, disclosed herein is a method for making, or producing, a multispecific antibody molecule. The method includes:

[0428] (i) providing a first heavy chain polypeptide (e.g., a heavy chain polypeptide comprising one, two, three or all of a first heavy chain variable region (first VH), a first CH1, a first heavy chain constant region (e.g., a first CH2, a first CH3, or both));

[0429] (ii) providing a second heavy chain polypeptide (e.g., a heavy chain polypeptide comprising one, two, three or all of a second heavy chain variable region (second VH), a second CH1, a second heavy chain constant region (e.g., a second CH2, a second CH3, or both));

[0430] (iii) providing a lambda chain polypeptide (e.g., a lambda light variable region (VLλ), a lambda light constant chain (VLλ), or both) that preferentially associates with the first heavy chain polypeptide (e.g., the first VH); and

[0431] (iv) providing a kappa chain polypeptide (e.g., a lambda light variable region (VLκ), a lambda light constant chain (VLκ), or both) that preferentially associates with the second heavy chain polypeptide (e.g., the second VH),

[0432] under conditions where (i)-(iv) associate.

[0433] In embodiments, the first and second heavy chain polypeptides form an Fc interface that enhances heterodimerization.

[0434] In embodiments, (i)-(iv) (e.g., nucleic acid encoding (i)-(iv)) are introduced in a single cell, e.g., a single mammalian cell, e.g., a CHO cell. In embodiments, (i)-(iv) are expressed in the cell.

[0435] In embodiments, (i)-(iv) (e.g., nucleic acid encoding (i)-(iv)) are introduced in different cells, e.g., different mammalian cells, e.g., two or more CHO cell. In embodiments, (i)-(iv) are expressed in the cells.

[0436] In one embodiments, the method further comprises purifying a cell-expressed antibody molecule, e.g., using a lambda- and/or kappa-specific purification, e.g., affinity chromatography.

[0437] In embodiments, the method further comprises evaluating the cell-expressed multispecific antibody molecule. For example, the purified cell-expressed multispecific antibody molecule can be analyzed by techniques known in the art, include mass spectrometry. In one embodiment, the purified cell-expressed antibody molecule is cleaved, e.g., digested with papain to yield the Fab moieties and evaluated using mass spectrometry.

[0438] In embodiments, the method produces correctly paired kappa/lambda multispecific, e.g., bispecific, antibody molecules in a high yield, e.g., at least 75%, 80, 90, 95, 98, 99 99.5 or 99.9 0.

[0439] In other embodiments, the multispecific, e.g., a bispecific, antibody molecule that includes:

[0440] (i) a first heavy chain polypeptide (HCP1) (e.g., a heavy chain polypeptide comprising one, two, three or all of a first heavy chain variable region (first VH), a first CH1, a first heavy chain constant region (e.g., a first CH2, a first CH3, or both)), e.g., wherein the HCP1 binds to a first epitope;

[0441] (ii) a second heavy chain polypeptide (HCP2) (e.g., a heavy chain polypeptide comprising one, two, three or all of a second heavy chain variable region (second VH), a second CH1, a second heavy chain constant region (e.g., a second CH2, a second CH3, or both)), e.g., wherein the HCP2 binds to a second epitope;

[0442] (iii) a lambda light chain polypeptide (LLCP1) (e.g., a lambda light variable region (VL1), a lambda light constant chain (VL1), or both) that preferentially associates with the first heavy chain polypeptide (e.g., the first VH), e.g., wherein the LLCP1 binds to a first epitope; and

[0443] (iv) a kappa light chain polypeptide (KLCP2) (e.g., a lambda light variable region (VLk), a lambda light constant chain (VLk), or both) that preferentially associates with the second heavy chain polypeptide (e.g., the second VH), e.g., wherein the KLCP2 binds to a second epitope.

[0444] In embodiments, the first and second heavy chain polypeptides form an Fe interface that enhances heterodimerization. In embodiments, the multispecific antibody molecule has a first binding specificity that includes a hybrid VL1-CLl heterodimerized to a first heavy chain variable region connected to the Fc constant, CH2-CH3 domain (having a knob modification) and a second binding specificity that includes a hybrid VLk-CLk heterodimerized to a second heavy chain variable region connected to the Fc constant, CH2-CH3 domain (having a hole modification).

### Multispecific Molecules Comprising Non-Contiguous Polypeptides

[0445] In one embodiment, the multispecific molecule is not a single polypeptide chain.

[0446] In one embodiment, the antibody molecule includes two, complete heavy chains and two, complete light chains. In one embodiment, the multispecific molecules having at least two or at least three non-contiguous polypeptide chains include a first and second heavy chain constant regions (e.g., a first and second Fc region) in at least two non-contiguous polypeptide chains, e.g., as described herein.

[0447] In embodiments, the multispecific molecule is a bispecific or bifunctional molecule, wherein the first and second polypeptides (i) and (ii) are non-contiguous, e.g., are two separate polypeptide chains. In some embodiments, the first and second polypeptides (i) and (ii) include a paired amino acid substitution at a position chosen from one or more of 347, 349, 350, 351, 366, 368, 370, 392, 394, 395, 397, 398, 399, 405, 407, or 409, e.g., of the Fc region of human IgG1, numbered based on the Eu numbering system. For example, the first heavy chain constant region (e.g., the first Fc region) can include an amino acid substitution chosen from: T366S, L368A, or Y407V (e.g., corresponding to a cavity or hole), and the second heavy chain constant region (e.g., the second Fc region) includes a T366W (e.g., corresponding to a protuberance or knob), numbered based on the Eu numbering system. In some embodiments, the first and second polypeptides are a first and second member of a heterodimeric first and second Fc region.

[0448] In some embodiments, the first polypeptide has the following configuration from N-to-C:

[0449] (a) a first portion of a first antigen domain, e.g., a first VH-CH1 of a Fab molecule, that binds to a first antigen, e.g., CSF1R, connected, optionally via a linker to, the first heavy chain constant region (e.g., the CH2 connected to the CH3 region) (e.g., a first Fc region); (b) a first portion of a second antigen domain, e.g., a second VH-CH1 of a Fab molecule, that binds to a second antigen, e.g., CCR2 or CXCR2, connected, optionally via a linker to, the second heavy chain constant region (e.g., the CH2 connected to the CH3 region) (e.g., a first Fc region); (c) the third polypeptide has the following configuration from N-to-C: a second portion of the first antigen domain, e.g., a first VL-CL of the Fab, where the VL is of kappa subtype and binds to the first antigen, e.g., CSF1R (e.g., the same antigen bound by the first VH-CH1); (d) the fourth polypeptide has the following configuration from N-to-C: a second portion of the second antigen domain, e.g. a second VL-CL of the Fab, where the VL is of lambda subtype and binds to a second antigen, e.g., a cancer antigen, e.g., CCR2 or CXCR2 (e.g., the same antigen bound by the second VH-CH1).

[0450] In embodiments, the first heavy chain constant region (e.g., the first CH2-CH3 region) includes a protuberance or knob, e.g., as described herein. In embodiments, the second heavy chain constant region (e.g., the second CH2-CH3 region) includes a cavity or hole. In embodiments, the first and second heavy chain constant regions promote heterodimerization of the bispecific molecule.

### TGF-Beta Inhibitor

[0451] In one aspect, provided herein is a multispecific antibody molecule comprising a TGF-beta inhibitor. In some embodiments, the TGF-beta inhibitor binds to and inhibits TGF-beta, e.g., reduces the activity of TGF-beta. In some embodiments, the TGF-beta inhibitor inhibits (e.g., reduces the activity of) TGF-beta 1. In some embodiments, the TGF-beta inhibitor inhibits (e.g., reduces the activity of) TGF-beta 2. In some embodiments, the TGF-beta inhibitor inhibits (e.g., reduces the activity of) TGF-beta 3. In some embodiments, the TGF-beta inhibitor inhibits (e.g., reduces the activity of) TGF-beta 1 and TGF-beta 3. In some embodiments, the TGF-beta inhibitor inhibits (e.g., reduces the activity of) TGF-beta 1, TGF-beta 2, and TGF-beta 3.

[0452] In some embodiments, the TGF-beta inhibitor comprises a portion of a TGF-beta receptor (e.g., an extracellular domain of a TGF-beta receptor) that is capable of inhibiting (e.g., reducing the activity of) TGF-beta, or functional fragment or variant thereof. In some embodiments, the TGF-beta inhibitor comprises a TGFBR1 polypeptide (e.g., an extracellular domain of TGFBR1 or functional variant thereof). In some embodiments, the TGF-beta inhibitor comprises a TGFBR2 polypeptide (e.g., an extracellular domain of TGFBR2 or functional variant thereof). In some embodiments, the TGF-beta inhibitor comprises a TGFBR3 polypeptide (e.g., an extracellular domain of TGFBR3 or functional variant thereof). In some embodiments, the TGF-beta inhibitor comprises a TGFBR1 polypeptide (e.g., an extracellular domain of TGFBR1 or functional variant thereof) and a TGFBR2 polypeptide (e.g., an extracellular domain of TGFBR2 or functional variant thereof). In some embodiments, the TGF-beta inhibitor comprises a TGFBR1 polypeptide (e.g., an extracellular domain of TGFBR1 or functional variant thereof) and a TGFBR3 polypeptide (e.g., an extracellular domain of TGFBR3 or functional variant thereof). In some embodiments, the TGF-beta inhibitor comprises a TGFBR2 polypeptide (e.g., an extracellular domain of TGFBR2 or functional variant thereof) and a TGFBR3 polypeptide (e.g., an extracellular domain of TGFBR3 or functional variant thereof).

[0453] Exemplary TGF-beta receptor polypeptides that can be used as TGF-beta inhibitors have been disclosed in U.S. Pat. Nos. 8,993,524, 9,676,863, 8,658,135, US20150056199, US20070184052, and WO2017037634, all of which are herein incorporated by reference in their entirety.

[0454] In some embodiments, the TGF-beta inhibitor comprises an extracellular domain of TGFBR1 or a sequence substantially identical thereto (e.g., a sequence that is at least 80%, 85%, 90%, or 95% identical thereto). In some embodiments, the TGF-beta inhibitor comprises an extracellular domain of SEQ ID NO: 95, or a sequence substantially identical thereto (e.g., a sequence that is at least 80%, 85%, 90%, or 95% identical thereto). In some embodiments, the TGF-beta inhibitor comprises an extracellular domain of SEQ ID NO: 96, or a sequence substantially identical thereto (e.g., a sequence that is at least 80%, 85%, 90%, or 95% identical thereto). In some embodiments, the TGF-beta inhibitor comprises an extracellular domain of SEQ ID NO: 97, or a sequence substantially identical thereto (e.g., a sequence that is at least 80%, 85%, 90%, or 95% identical thereto). In some embodiments, the TGF-beta inhibitor comprises the amino acid sequence of SEQ ID NO: 104, or a sequence substantially identical thereto (e.g., a sequence that is at least 80%, 85%, 90%, or 95% identical thereto). In some embodiments, the TGF-beta inhibitor comprises the amino acid sequence of SEQ ID NO: 105, or a sequence substantially identical thereto (e.g., a sequence that is at least 80%, 85%, 90%, or 95% identical thereto).

[0455] In some embodiments, the TGF-beta inhibitor comprises an extracellular domain of TGFBR2 or a sequence substantially identical thereto (e.g., a sequence that is at least 80%, 85%, 90%, or 95% identical thereto). In some embodiments, the TGF-beta inhibitor comprises an extracellular domain of SEQ ID NO: 98, or a sequence substantially identical thereto (e.g., a sequence that is at least 80%, 85%, 90%, or 95% identical thereto). In some embodiments, the TGF-beta inhibitor comprises an extracellular domain of SEQ ID NO: 99, or a sequence substantially identical thereto (e.g., a sequence that is at least 80%, 85%, 90%, or 95% identical thereto). In some embodiments, the TGF-beta inhibitor comprises the amino acid sequence of SEQ ID NO: 100, or a sequence substantially identical thereto (e.g., a sequence that is at least 80%, 85%, 90%, or 95% identical thereto). In some embodiments, the TGF-beta inhibitor comprises the amino acid sequence of SEQ ID NO: 101, or a sequence substantially identical thereto (e.g., a sequence that is at least 80%, 85%, 90%, or 95% identical thereto). In some embodiments, the TGF-beta inhibitor comprises the amino acid sequence of SEQ ID NO: 102, or a sequence substantially identical thereto (e.g., a sequence that is at least 80%, 85%, 90%, or 95% identical thereto). In some embodiments, the TGF-beta inhibitor comprises the amino acid sequence of SEQ ID NO: 103, or a sequence substantially identical thereto (e.g., a sequence that is at least 80%, 85%, 90%, or 95% identical thereto).

[0456] In some embodiments, the TGF-beta inhibitor comprises an extracellular domain of TGFBR3 or a sequence substantially identical thereto (e.g., a sequence that is at least 80%, 85%, 90%, or 95% identical thereto). In some embodiments, the TGF-beta inhibitor comprises an extracellular domain of SEQ ID NO: 106, or a sequence substantially identical thereto (e.g., a sequence that is at least 80%, 85%, 90%, or 95% identical thereto). In some embodiments, the TGF-beta inhibitor comprises an extracellular domain of SEQ ID NO: 107, or a sequence substantially identical thereto (e.g., a sequence that is at least 80%, 85%, 90%, or 95% identical thereto). In some embodiments, the TGF-beta inhibitor comprises the amino acid sequence of SEQ ID NO: 108, or a sequence substantially identical thereto (e.g., a sequence that is at least 80%, 85%, 90%, or 95% identical thereto).

[0457] In some embodiments, the TGF-beta inhibitor comprises no more than one TGF-beta receptor extracellular domain. In some embodiments, the TGF-beta inhibitor comprises two or more (e.g., two, three, four, five, or more) TGF-beta receptor extracellular domains, linked together, e. g., via a linker.

TABLE 12
Exemplary amino acid sequences of TGF-beta polypeptides or TGF-beta receptor
polypeptides

| SEQ ID NO | Description | Amino acid sequence |
|---|---|---|
| SEQ ID NO: 92 | Immature human | MPPSGLRLLLLLLPLLWLLVLTPGRPAAGLSTCKTIDMELVKR |
| | TGF-beta 1 | KRIEAIRGQILSKLRLASPPSQGEVPPGPLPEAVLALYNSTRDRV |
| | (P01137-1) | AGESAEPEPEPEADYYAKEVTRVLMVETHNEIYDKFKQSTHSI |
| | | YMFFNTSELREAVPEPVLLSRAELRLLRLKLKVEQHVELYQKY |
| | | SNNSWRYLSNRLLAPSDSPEWLSFDVTGVVRQWLSRGGEIEGF |
| | | RLSAHCSCDSRDNTLQVDINGFTTGRRGDLATIHGMNRPFLLL |
| | | MATPLERAQHLQSSRHRRALDTNYCFSTEKNCCVRQLYIDFR |
| | | KDLGWKWIHEPKGYHANFCLGPCPYIWSLDTQYSKVLALYNQ |
| | | HNPGASAAPCCVPQALEPLPIVYYVGRKPKVEQLSNMIVRSCK |
| | | CS |
| SEQ ID NO: | Human TGF-beta 1 | LSTCKTIDMELVKRKRIEAIRGQILSKLRLASPPSQGEVPPGPLP |
| 117 | (P01137-1) | EAVLALYNSTRDRVAGESAEPEPEPEADYYAKEVTRVLMVET |
| | | HNEIYDKFKQSTHSIYMFFNTSELREAVPEPVLLSRAELRLLRL |
| | | KLKVEQHVELYQKYSNNSWRYLSNRLLAPSDSPEWLSFDVTG |
| | | VVRQWLSRGGEIEGFRLSAHCSCDSRDNTLQVDINGFTTGRRG |
| | | DLATIHGMNRPFLLLMATPLERAQHLQSSRHRRALDTNYCFSS |
| | | TEKNCCVRQLYIDFRKDLGWKWIHEPKGYHANFCLGPCPYIW |
| | | SLDTQYSKVLALYNQHNPGASAAPCCVPQALEPLPIVYYVGRK |
| | | PKVEQLSNMIVRSCKCS |
| SEQ ID NO: 93 | Immature human | MHYCVLSAFLILHLVTVALSLSTCSTLDMDQFMRKRIEAIRGQI |
| | TGF-beta 2 | LSKLKLTSPPEDYPEPEEVPPEVISIYNSTRDLLQEKASRRAAAC |
| | (P61812-1) | ERERSDEEYYAKEVYKIDMPPFFPSENAIPPTFYRPYFRIVRFDV |
| | | SAMEKNASNLVKAEFRVFRLQNPKARVPEQRIELYQILKSKDL |
| | | TSPTQRYIDSKVVKTRAEGEWLSFDVTDAVHEWLHHKDRNLG |
| | | FKISLHCPCCTFVPSNNYIIPNKSEELEARFAGIDGTSTYTSGDQ |
| | | KTIKSTRKKNSGKTPHLLLMLLPSYRLESQQTNRRKKRALDAA |
| | | YCFRNVQDNCCLRPLYIDFKRDLGWKWIHEPKGYNANFCAGA |
| | | CPYLWSSDTQHSRVLSLYNTINPEASASPCCVSQDLEPLTILYYI |
| | | GKTPKIEQLSNMIVKSCKCS |
| SEQ ID NO: | Human TGF-beta 2 | LSTCSTLDMDQFMRKRIEAIRGQILSKLKLTSPPEDYPEPEEVPP |
| 118 | (P61812-1) | EVISIYNSTRDLLQEKASRRAAACERERSDEEYYAKEVYKIDMP |
| | | PFFPSENAIPPTFYRPYFRIVRFDVSAMEKNASNLVKAEFRVFRL |
| | | QNPKARVPEQRIELYQILKSKDLTSPTQRYIDSKVVKTRAEGEW |
| | | LSFDVTDAVHEWLHHKDRNLGFKISLHCPCCTFVPSNNYIIPNK |
| | | SEELEARFAGIDGTSTYTSGDQKTIKSTRKKNSGKTPHLLLMLL |
| | | PSYRLESQQTNRRKKRALDAAYCFRNVQDNCCLRPLYIDFKRD |
| | | LGWKWIHEPKGYNANFCAGACPYLWSSDTQHSRVLSLYNTIN |
| | | PEASASPCCVSQDLEPLTILYYIGKTPKIEQLSNMIVKSCKCS |
| SEQ ID NO: 94 | Immature human | MKMHLQRALVVLALLNFATVSLSLSTCTTLDFGHIKKKRVEAI |
| | TGF-beta 3 | RGQILSKLRLTSPPEPTVMTHVPYQVLALYNSTRELLEEMHGE |
| | (P10600-1) | REEGCTQENTESEYYAKEIHKFDMIQGLAEHNELAVCPKGITSK |
| | | VFRFNVSSVEKNRTNLFRAEFRVLRVPNPSSKRNEQRIELFQILR |
| | | PDEHIAKQRYIGGKNLPTRGTAEWLSFDVTDTVREWLLRRESN |
| | | LGLEISIHCPCHTFQPNGDILENIHEVMEIKFKGVDNEDDHGRG |
| | | DLGRLKKQKDHHNPHLILMMIPPHRLDNPGQGGQRKKRALDT |
| | | NYCFRNLEENCCVRPLYIDFRQDLGWKWVHEPKGYYANFCSG |
| | | PCPYLRSADTTHSTVLGLYNTLNPEASASPCCVPQDLEPLTILY |
| | | YVGRTPKVEQLSNMVVKSCKCS |
| SEQ ID NO: | Human TGF-beta 3 | LSTCTTLDFGHIKKKRVEAIRGQILSKLRLTSPPEPTVMTHVPYQ |
| 119 | (P10600-1) | VLALYNSTRELLEEMHGEREEGCTQEN1ESEYYAKEIHKFDMI |
| | | QGLAEHNELAVCPKGITSKVFRFNVSSVEKNRTNLFRAEFRVL |
| | | RVPNPSSKRNEQRIELFQILRPDEHIAKQRYIGGKNLPTRGTAE |
| | | WLSFDVTDTVREWLLRRESNLGLEISIHCPCHTFQPNGDILENIH |
| | | EVMEIKFKGVDNEDDHGRGDLGRLKKQKDHHNPHLILMMIPP |
| | | HRLDNPGQGGQRKKRALDTNYCFRNLEENCCVRPLYIDFRQD |
| | | LGWKWVHEPKGYYANFCSGPCPYLRSADTTHSTVLGLYNTLN |
| | | PEASASPCCVPQDLEPLTILYYVGRTPKVEQLSNMVVKSCKCS |
| SEQ ID NO: 95 | Immature human | MEAAVAAPRPRLLLLVLAAAAAAAAALLPGATALQCFCHLCT |
| | TGFBR1 isoform 1 | KDNFTCVTDGLCFVSVTETTDKVIHNSMCIAEIDLIPRDRPFVC |
| | (P36897-1) | APSSKTGSVTTTYCCNQDHCNKIELPTTVKSSPGLGPVELAAVI |
| | | AGPVCFVCISLMLMVYICHNRTVIHHRVPNEEDPSLDRPFISEG |
| | | TTLKDLIYDMTTSGSGSGLPLLVQRTIARTIVLQESIGKGRFGEV |
| | | WRGKWRGEEVAVKIFSSREERSWFREAEIYQTVMLRHENILGF |
| | | IAADNKDNGTWTQLWLVSDYHEHGSLFDYLNRYTVTVEGMIK |
| | | LALSTASGLAHLHMEIVGTQGKPAIAHRDLKSKNILVKKNGTC |
| | | CIADLGLAVRHDSATDTIDIAPNHRVGTKRYMAPEVLDDSINM |
| | | KHFESFKRADIYAMGLVFWEIARRCSIGGIHEDYQLPYYDLVPS |
| | | DPSVEEMRKVVCEQKLRPNIPNRWQSCEALRVMAKIMRECWY |
| | | ANGAARLTALRIKKTLSQLSQQEGIKM |
| SEQ ID NO: | Human TGFBR1 | LQCFCHLCTKDNFTCVTDGLCFVSVTETTDKVIHNSMCIAEIDL |
| 120 | isoform 1 (P36897- | IPRDRPFVCAPSSKTGSVTTTYCCNQDHCNKIELPTTVKSSPGL |
| | 1) | GPVELAAVIAGPVCFVCISLMLMVYICHNRTVIHHRVPNEEDPS |
| | | LDRPFISEGTTLKDLIYDMTTSGSGSGLPLLVQRTIARTIVLQESI |
| | | GKGRFGEVWRGKWRGEEVAVKIFSSREERSWFREAEIYQTVM |
| | | LRHENILGFIAADNKDNGTWTQLWLVSDYHEHGSLFDYLNRY |
| | | TVTVEGMIKLALSTASGLAHLHMEIVGTQGKPAIAHRDLKSKN |
| | | ILVKKNGTCCIADLGLAVRHDSATDTIDIAPNHRVGTKRYMAP |
| | | EVLDDSINNIKHFESFKRADIYAMGLVFWEIARRCSIGGIHEDYQ |
| | | LPYYDLVPSDPSVEEMRKVVCEQKLRPNIPNRWQSCEALRVM |
| | | AKIMRECWYANGAARLTALRIKKTLSQLSQQEGIKM |
| SEQ ID NO: 96 | Immature human | MEAAVAAPRPRLLLLVLAAAAAAAAALLPGATALQCFCHLCT |
| | TGFBR1 isoform 2 | KDNFTCVTDGLCFVSVTETTDKVIHNSMCIAEIDLIPRDRPFVC |
| | (P36897-2) | APSSKTGSVTTTYCCNQDHCNKIELPTTGPFSVKSSPGLGPVEL |
| | | AAVIAGPVCFVCISLMLMVYICHNRTVIHHRVPNEEDPSLDRPF |
| | | ISEGTTLKDLIYDMTTSGSGSGLPLLVQRTIARTIVLQESIGKGR |
| | | FGEVWRGKWRGEEVAVKIFSSREERSWFREAEIYQTVMLRHE |
| | | NILGFIAADNKDNGTWTQLWLVSDYHEHGSLFDYLNRYTVTV |
| | | EGMIKLALSTASGLAHLHMEIVGTQGKPAIAHRDLKSKNILVK |
| | | KNGTCCIADLGLAVRHDSATDTIDIAPNHRVGTKRYMAPEVLD |
| | | DSINNIKHFESFKRADIYAMGLVFWEIARRCSIGGIHEDYQLPYY |
| | | DLVPSDPSVEEMRKVVCEQKLRPNIPNRWQSCEALRVMAKIM |
| | | RECWYANGAARLTALRIKKTLSQLSQQEGIKM |
| SEQ ID NO: | Human TGFBR1 | LQCFCHLCTKDNFTCVTDGLCFVSVTETTDKVIHNSMCIAEIDL |
| 121 | isoform 2 (P36897- | IPRDRPFVCAPSSKTGSVTTTYCCNQDHCNKIELPTTGPFSVKSS |
| | 2) | PGLGPVELAAVIAGPVCFVCISLMLMVYICHNRTVIHHRVPNEE |
| | | DPSLDRPFISEGTTLKDLIYDMTTSGSGSGLPLLVQRTIARTIVL |
| | | QESIGKGRFGEVWRGKWRGEEVAVKIFSSREERSWFREAEIYQ |
| | | TVMLRHENILGFIAADNKDNGTWTQLWLVSDYHEHGSLFDYL |
| | | NRYTVTVEGMIKLALSTASGLAHLHMEIVGTQGKPAIAHRDLK |
| | | SKNILVKKNGTCCIADLGLAVRHDSATDTIDIAPNHRVGTKRY |
| | | MAPEVLDDSINMKHFESFKRADIYAMGLVFWEIARRCSIGGIHE |
| | | DYQLPYYDLVPSDPSVEEMRKVVCEQKLRPNIPNRWQSCEALR |
| | | VMAKIMRECWYANGAARLTALRIKKTLSQLSQQEGIKM |
| SEQ ID NO: 97 | Immature human | MEAAVAAPRPRLLLLVLAAAAAAAAALLPGATALQCFCHLCT |
| | TGFBR1 isoform 3 | KDNFTCVTDGLCFVSVTETTDKVIHNSMCIAEIDLIPRDRPFVC |
| | (P36897-3) | APSSKTGSVTTTYCCNQDHCNKIELPTTGLPLLVQRTIARTIVLQ |
| | | ESIGKGRFGEVWRGKWRGEEVAVKIFSSREERSWFREAEIYQT |
| | | VMLRHENILGFIAADNKDNGTWTQLWLVSDYHEHGSLFDYLN |
| | | RYTVTVEGMIKLALSTASGLAHLHMEIVGTQGKPAIAHRDLKS |
| | | KNILVKKNGTCCIADLGLAVRHDSATDTIDIAPNHRVGTKRYM |
| | | APEVLDDSINNIKHFESFKRADIYAMGLVFWEIARRCSIGGIHED |
| | | YQLPYYDLVPSDPSVEEMRKVVCEQKLRPNIPNRWQSCEALRV |
| | | MAKIMRECWYANGAARLTALRIKKTLSQLSQQEGIKM |
| SEQ ID NO: | Human TGFBR1 | LQCFCHLCTKDNFTCVTDGLCFVSVTETTDKVIHNSMCIAEIDL |
| 122 | isoform 3 (P36897- | IPRDRPFVCAPSSKTGSVTTTYCCNQDHCNKIELPTTGLPLLVQ |
| | 3) | RTIARTIVLQESIGKGRFGEVWRGKWRGEEVAVKIFSSREERSW |
| | | FREAEIYQTVMLRHENILGFIAADNKDNGTWTQLWLVSDYHE |
| | | HGSLFDYLNRYTVTVEGMIKLALSTASGLAHLHMEIVGTQGKP |
| | | AIAHRDLKSKNILVKKNGTCCIADLGLAVRHDSATDTIDIAPNH |
| | | RVGTKRYMAPEVLDDSINNIKHFESFKRADIYAMGLVFWEIAR |
| | | RCSIGGIHEDYQLPYYDLVPSDPSVEEMRKVVCEQKLRPNIPNR |
| | | WQSCEALRVMAKIMRECWYANGAARLTALRIKKTLSQLSQQE |
| | | GIKM |
| SEQ ID NO: | Human TGFBR1 | LQCFCHLCTKDNFTCVTDGLCFVSVTETTDKVIHNSMCIAEIDL |
| 104 | fragment 1 | IPRDRPFVCAPSSKTGSVTTTYCCNQDHCNKIELPTTVKSSPGL |
| | | GPVEL |
| SEQ ID NO: | Human TGFBR1 | ALQCFCHLCTKDNFTCVTDGLCFVSVTETTDKVIHNSMCIAEID |
| 105 | fragment 2 | LIPRDRPFVCAPSSKTGSVTTTYCCNQDHCNKIEL |
| SEQ ID NO: | TGFβR1 fragment 3 | LLPGATALQCFCHLCTKDNFTCVTDGLCFVSV1ETTDKVIHNS |
| 135 | | MCIAEIDLIPRDRPFVCAPSSKTGSVTTTYCCNQDHCNKIELPTT |
| | | VKSSPGLGPVE |
| SEQ ID NO: 98 | Immature human | MGRGLLRGLWPLHIVLWTRIASTIPPHVQKSVNNDMIVTDNNG |
| | TGFBR2 isoform B | AVKFPQLCKFCDVRFSTCDNQKSCMSNCSITSICEKPQEVCVA |
| | (short isoform) | VWRKNDENITLETVCHDPKLPYHDFILEDAASPKCIMKEKKKP |
| | (P37173-1) | GETFFMCSCSSDECNDNIIFSEEYNTSNPDLLLVIFQVTGISLLPP |
| | | LGVAISVIIIFYCYRVNRQQKLSSTWETGKTRKLMEFSEHCAIIL |
| | | EDDRSDISSTCANNINHNTELLPIELDTLVGKGRFAEVYKAKLK |
| | | QNTSEQFETVAVKIFPYEEYASWKIEKDIFSDINLKHENILQFLT |
| | | AEERKTELGKQYWLITAFHAKGNLQEYLTRHVISWEDLRKLGS |
| | | SLARGIAHLHSDHTPCGRPKMPIVHRDLKSSNILVKNDLTCCLC |
| | | DFGLSLRLDPTLSVDDLANSGQVGTARYMAPEVLESRMNLEN |
| | | VESFKQTDVYSMALVLWEMTSRCNAVGEVKDYEPPFGSKVRE |
| | | HPCVESMKDNVLRDRGRPEIPSFWLNHQGIQMVCETLTECWD |
| | | HDPEARLTAQCVAERFSELEHLDRLSGRSCSEEKIPEDGSLNTT |
| | | K |
| SEQ ID NO: | Human TGFBR2 | TIPPHVQKSVNNDMIVTDNNGAVKFPQLCKFCDVRFSTCDNQK |
| 123 | isoform B (short | SCMSNCSITSICEKPQEVCVAVWRKNDENITLETVCHDPKLPYH |
| | isoform) | DFILEDAASPKCIMKEKKKPGETFFMCSCSSDECNDNIIFSEEYN |
| | (P37173-1) | TSNPDLLLVIFQVTGISLLPPLGVAISVIIIFYCYRVNRQQKLSST |
| | | WETGKTRKLMEFSEHCAIILEDDRSDISSTCANNINHNIELLPIE |
| | | LDTLVGKGRFAEVYKAKLKQNTSEQFETVAVKIFPYEEYASW |
| | | KTEKDIFSDINLKHENILQFLTAEERKTELGKQYWLITAFHAKG |
| | | NLQEYLTRHVISWEDLRKLGSSLARGIAHLHSDHTPCGRPKMPI |
| | | VHRDLKSSNILVKNDLTCCLCDFGLSLRLDPTLSVDDLANSGQ |
| | | VGTARYMAPEVLESRMNLENVESFKQTDVYSMALVLWEMTS |
| | | RCNAVGEVKDYEPPFGSKVREHPCVESMKDNVLRDRGRPEIPS |
| | | FWLNHQGIQMVCETLTECWDHDPEARLTAQCVAERFSELEHL |
| | | DRLSGRSCSEEKIPEDGSLNTTK |
| SEQ ID NO: 99 | Immature human | MGRGLLRGLWPLHIVLWTRIASTIPPHVQKSDVEMEAQKDEIIC |
| | TGFBR2 isoform A | PSCNRTAHPLRHINNDMIVTDNNGAVKFPQLCKFCDVRFSTCD |
| | (long isoform) | NQKSCMSNCSITSICEKPQEVCVAVWRKNDENITLETVCHDPK |
| | (P37173-2) | LPYHDFILEDAASPKCIMKEKKKPGETFFMCSCSSDECNDNIIFS |
| | | EEYNTSNPDLLLVIFQVTGISLLPPLGVAISVIIIFYCYRVNRQQK |
| | | LSSTWETGKTRKLMEFSEHCAIILEDDRSDISSTCANNINHNILL |
| | | LPIELDTLVGKGRFAEVYKAKLKQNTSEQFETVAVKIFPYEEYA |
| | | SWKIEKDIFSDINLKHENILQFLTAEERKTELGKQYWLITAFHA |
| | | KGNLQEYLTRHVISWEDLRKLGSSLARGIAHLHSDHTPCGRPK |
| | | MPIVHRDLKSSNILVKNDLTCCLCDFGLSLRLDPTLSVDDLANS |
| | | GQVGTARYMAPEVLESRMNLENVESFKQTDVYSMALVLWEM |
| | | TSRCNAVGEVKDYEPPFGSKVREHPCVESMKDNVLRDRGRPEI |
| | | PSFWLNHQGIQMVCETLTECWDHDPEARLTAQCVAERFSELE |
| | | HLDRLSGRSCSEEKIPEDGSLNTTK |
| SEQ ID NO: | Human TGFBR2 | TIPPHVQKSDVEMEAQKDEIICPSCNRTAHPLRHINNDMIVTDN |
| 124 | isoform A (long | NGAVKFPQLCKFCDVRFSTCDNQKSCMSNCSITSICEKPQEVC |
| | isoform) | VAVWRKNDENITLETVCHDPKLPYHDFILEDAASPKCIMKEKK |
| | (P37173-2) | KPGETFFMCSCSSDECNDNIIFSEEYNTSNPDLLLVIFQVTGISLL |
| | | PPLGVAISVIIIFYCYRVNRQQKLSSTWETGKTRKLMEFSEHCAI |
| | | ILEDDRSDISSTCANNINHNTELLPIELDTLVGKGRFAEVYKAKL |
| | | KQNTSEQFETVAVKIFPYEEYASWKTEKDIFSDINLKHENILQFL |
| | | TAEERKTELGKQYWLITAFHAKGNLQEYLTRHVISWEDLRKL |
| | | GSSLARGIAHLHSDHTPCGRPKMPIVHRDLKSSNILVKNDLTCC |
| | | LCDFGLSLRLDPTLSVDDLANSGQVGTARYMAPEVLESRMNL |
| | | ENVESFKQTDVYSMALVLWEMTSRCNAVGEVKDYEPPFGSKV |
| | | REHPCVESMKDNVLRDRGRPEIPSFWLNHQGIQMVCETLTEC |
| | | WDHDPEARLTAQCVAERFSELEHLDRLSGRSCSEEKIPEDGSLN |
| | | TTK |
| SEQ ID NO: | Human TGFBR2 | TIPPHVQKSVNNDMIVTDNNGAVKFPQLCKFCDVRFSTCDNQK |
| 100 | fragment 1 (ECD of | SCMSNCSITSICEKPQEVCVAVWRKNDENITLETVCHDPKLPYH |
| | human TGFBR2 | DFILEDAASPKCIMKEKKKPGETFFMCSCSSDECNDNIIFSEEYN |
| | isoform B) | TSNPD |
| SEQ ID NO: | Human TGFBR2 | IPPHVQKSVNNDMIVTDNNGAVKFPQLCKFCDVRFSTCDNQKS |
| 101 | fragment 2 | CMSNCSITSICEKPQEVCVAVWRKNDENITLETVCHDPKLPYH |
| | | DFILEDAASPKCIMKEKKKPGETFFMCSCSSDECNDNIIFSEEYN |
| | | TSNPD |
| SEQ ID NO: | Human TGFBR2 | TIPPHVQKSDVEMEAQKDEIICPSCNRTAHPLRHINNDMIVTDN |
| 102 | fragment 3 (ECD of | NGAVKFPQLCKFCDVRFSTCDNQKSCMSNCSITSICEKPQEVC |
| | human TGFBR2 | VAVWRKNDENITLETVCHDPKLPYHDFILEDAASPKCIMKEKK |
| | isoform A) | KPGETFFMCSCSSDECNDNIIFSEEYNTSNPD |
| SEQ ID NO: | Human TGFBR2 | QLCKFCDVRFSTCDNQKSCMSNCSITSICEKPQEVCVAVWRKN |
| 103 | fragment 4 | DENITLETVCHDPKLPYHDFILEDAASPKCIMKEKKKPGETFFM |
| | | CSCSSDECNDNIIF |
| SEQ ID NO: | Immature human | MTSHYVIAIFALMSSCLATAGPEPGALCELSPVSASHPVQALME |
| 106 | TGFBR3 isoform 1 | SFTVLSGCASRGTTGLPQEVHVLNLRTAGQGPGQLQREVTLHL |
| | (Q03167-1) | NPISSVHIHHKSVVFLLNSPHPLVWHLKTERLATGVSRLFLVSE |
| | | GSVVQFSSANFSLTAETEERNFPHGNEHLLNWARKEYGAVTSF |
| | | TELKIARNIYIKVGEDQVFPPKCNIGKNFLSLNYLAEYLQPKAA |
| | | EGCVMSSQPQNEEVHIIELITPNSNPYSAFQVDITIDIRPSQEDLE |
| | | VVKNLILILKCKKSVNWVIKSFDVKGSLKIIAPNSIGFGKESERS |
| | | MTMTKSIRDDIPSTQGNLVKWALDNGYSPITSYTMAPVANRFH |
| | | LRLENNAEEMGDEEVHTIPPELRILLDPGALPALQNPPIRGGEG |
| | | QNGGLPFPFPDISRRVWNEEGEDGLPRPKDPVIPSIQLFPGLREP |
| | | EEVQGSVDIALSVKCDNEKMIVAVEKDSFQASGYSGMDVTLL |
| | | DPTCKAKMNGTHFVLESPLNGCGTRPRWSALDGVVYYNSIVIQ |
| | | VPALGDSSGWPDGYEDLESGDNGFPGDMDEGDASLFTRPEIVV |
| | | FNCSLQQVRNPSSFQEQPHGNITFNMELYNTDLFLVPSQGVFSV |
| | | PENGHVYVEVSVTKAEQELGFAIQTCFISPYSNPDRMSHYTIIEN |
| | | ICPKDESVKFYSPKRVHFPIPQADMDKKRFSFVFKPVFNTSLLF |
| | | LQCELTLCTKMEKHPQKLPKCVPPDEACTSLDASIIWAMMQN |
| | | KKTFTKPLAVIHHEAESKEKGPSMKEPNPISPPIFHGLDTLTVM |
| | | GIAFAAFVIGALLTGALWYIYSHTGETAGRQQVPTSPPASENSS |
| | | AAHSIGSTQSTPCSSSSTA |
| SEQ ID NO: | Human TGFBR3 | GPEPGALCELSPVSASHPVQALMESFTVLSGCASRGTTGLPQEV |
| 125 | isoform 1 (Q03167- | HVLNLRTAGQGPGQLQREVTLHLNPISSVHIHHKSVVFLLNSPH |
| | 1) | PLVWHLKTERLATGVSRLFLVSEGSVVQFSSANFSLTAETEERN |
| | | FPHGNEHLLNWARKEYGAVTSFTELKIARNIYIKVGEDQVFPP |
| | | KCNIGKNFLSLNYLAEYLQPKAAEGCVMSSQPQNEEVHIIELIT |
| | | PNSNPYSAFQVDITIDIRPSQEDLEVVKNLILILKCKKSVNWVIK |
| | | SFDVKGSLKIIAPNSIGFGKESERSMTMTKSIRDDIPSTQGNLVK |
| | | WALDNGYSPITSYTMAPVANRFHLRLENNAEEMGDEEVHTIPP |
| | | ELRILLDPGALPALQNPPIRGGEGQNGGLPFPFPDISRRVWNEE |
| | | GEDGLPRPKDPVIPSIQLFPGLREPEEVQGSVDIALSVKCDNEK |
| | | MIVAVEKDSFQASGYSGMDVTLLDPTCKAKMNGTHFVLESPL |
| | | NGCGTRPRWSALDGVVYYNSIVIQVPALGDSSGWPDGYEDLE |
| | | SGDNGFPGDMDEGDASLFTRPEIVVFNCSLQQVRNPSSFQEQP |
| | | HGNITFNMELYNTDLFLVPSQGVFSVPENGHVYVEVSVTKAEQ |
| | | ELGFAIQTCFISPYSNPDRMSHYTIIENICPKDESVKFYSPKRVHF |
| | | PIPQADMDKKRFSFVFKPVFNTSLLFLQCELTLCTKMEKHPQKL |
| | | PKCVPPDEACTSLDASIIWAMMQNKKTFTKPLAVIHHEAESKE |
| | | KGPSMKEPNPISPPIFHGLDTLTVMGIAFAAFVIGALLTGALWYI |
| | | YSHTGETAGRQQVPTSPPASENSSAAHSIGSTQSTPCSSSSTA |
| SEQ ID NO: | Immature human | MTSHYVIAIFALMSSCLATAGPEPGALCELSPVSASHPVQALME |
| 107 | TGFBR3 isoform 2 | SFTVLSGCASRGTTGLPQEVHVLNLRTAGQGPGQLQREVTLHL |
| | (Q03167-2) | NPISSVHIHHKSVVFLLNSPHPLVWHLKTERLATGVSRLFLVSE |
| | | GSVVQFSSANFSLTAETEERNFPHGNEHLLNWARKEYGAVTSF |
| | | TELKIARNIYIKVGEDQVFPPKCNIGKNFLSLNYLAEYLQPKAA |
| | | EGCVMSSQPQNEEVHIIELITPNSNPYSAFQVDITIDIRPSQEDLE |
| | | VVKNLILILKCKKSVNWVIKSFDVKGSLKIIAPNSIGFGKESERS |
| | | MTMTKSIRDDIPSTQGNLVKWALDNGYSPITSYTMAPVANRFH |
| | | LRLENNEEMGDEEVHTIPPELRILLDPGALPALQNPPIRGGEGQ |
| | | NGGLPFPFPDISRRVWNEEGEDGLPRPKDPVIPSIQLFPGLREPE |
| | | EVQGSVDIALSVKCDNEKMIVAVEKDSFQASGYSGMDVTLLD |
| | | PTCKAKMNGTHFVLESPLNGCGTRPRWSALDGVVYYNSIVIQV |
| | | PALGDSSGWPDGYEDLESGDNGFPGDMDEGDASLFTRPEIVVF |
| | | NCSLQQVRNPSSFQEQPHGNITFNMELYNTDLFLVPSQGVFSVP |
| | | ENGHVYVEVSVTKAEQELGFAIQTCFISPYSNPDRMSHYTIIENI |
| | | CPKDESVKFYSPKRVHFPIPQADMDKKRFSFVFKPVFNTSLLFL |
| | | QCELTLCTKMEKHPQKLPKCVPPDEACTSLDASIIWAMMQNK |
| | | KTFTKPLAVIHHEAESKEKGPSMKEPNPISPPIFHGLDTLTVMGI |
| | | AFAAFVIGALLTGALWYIYSHTGETAGRQQVPTSPPASENSSAA |
| | | HSIGSTQSTPCSSSSTA |
| SEQ ID NO: | Human TGFBR3 | GPEPGALCELSPVSASHPVQALMESFTVLSGCASRGTTGLPQEV |
| 126 | isoform 2 (Q03167- | HVLNLRTAGQGPGQLQREVTLHLNPISSVHIHHKSVVFLLNSPH |
| | 2) | PLVWHLKTERLATGVSRLFLVSEGSVVQFSSANFSLTAETEERN |
| | | FPHGNEHLLNWARKEYGAVTSFTELKIARNIYIKVGEDQVFPP |
| | | KCNIGKNFLSLNYLAEYLQPKAAEGCVMSSQPQNEEVHIIELIT |
| | | PNSNPYSAFQVDITIDIRPSQEDLEVVKNLILILKCKKSVNWVIK |
| | | SFDVKGSLKIIAPNSIGFGKESERSMTMTKSIRDDIPSTQGNLVK |
| | | WALDNGYSPITSYTMAPVANRFHLRLENNEEMGDEEVHTIPPE |
| | | LRILLDPGALPALQNPPIRGGEGQNGGLPFPFPDISRRVWNEEG |
| | | EDGLPRPKDPVIPSIQLFPGLREPEEVQGSVDIALSVKCDNEKMI |
| | | VAVEKDSFQASGYSGMDVTLLDPTCKAKMNGTHFVLESPLNG |
| | | CGTRPRWSALDGVVYYNSIVIQVPALGDSSGWPDGYEDLESG |
| | | DNGFPGDMDEGDASLFTRPEIVVFNCSLQQVRNPSSFQEQPHG |
| | | NITFNMELYNTDLFLVPSQGVFSVPENGHVYVEVSVTKAEQEL |
| | | GFAIQTCFISPYSNPDRMSHYTIIENICPKDESVKFYSPKRVHFPI |
| | | PQADMDKKRFSFVFKPVFNTSLLFLQCELTLCTKMEKHPQKLP |
| | | KCVPPDEACTSLDASIIWANIMQNKKTFTKPLAVIHHEAESKEK |
| | | GPSMKEPNPISPPIFHGLDTLTVMGIAFAAFVIGALLTGALWYIY |
| | | SHTGETAGRQQVPTSPPASENSSAAHSIGSTQSTPCSSSSTA |
| SEQ ID NO: | Human TGFBR3 | GPEPGALCELSPVSASHPVQALMESFTVLSGCASRGTTGLPQEV |
| 108 | fragment 1 | HVLNLRTAGQGPGQLQREVTLHLNPISSVEIHEKSVVFLLNSPE |
| | | PLVWHLKTERLATGVSRLFLVSEGSVVQFSSANFSLTAETEERN |
| | | FPEGNEELLNWARKEYGAVTSFTELKIARNIYIKVGEDQVFPP |
| | | KCNIGKNFLSLNYLAEYLQPKAAEGCVMSSQPQNEEVHIIELIT |
| | | PNSNPYSAFQVDITIDIRPSQEDLEVVKNLILILKCKKSVNWVIK |
| | | SFDVKGSLKIIAPNSIGFGKESERSMTMTKSIRDDIPSTQGNLVK |
| | | WALDNGYSPITSYTMAPVANRFELRLENNAEEMGDEEVETIPP |
| | | ELRILLDPGALPALQNPPIRGGEGQNGGLPFPFPDISRRVWNEE |
| | | GEDGLPRPKDPVIPSIQLFPGLREPEEVQGSVDIALSVKCDNEK |
| | | MIVAVEKDSFQASGYSGMDVTLLDPTCKAKMNGTHFVLESPL |
| | | NGCGTRPRWSALDGVVYYNSIVIQVPALGDSSGWPDGYEDLE |
| | | SGDNGFPGDMDEGDASLFTRPEIVVFNCSLQQVRNPSSFQEQP |
| | | HGNITFNMELYNTDLFLVPSQGVFSVPENGHVYVEVSVTKAEQ |
| | | ELGFAIQTCFISPYSNPDRMSHYTIIENICPKDESVKFYSPKRVHF |
| | | PIPQADMDKKRFSFVFKPVFNTSLLFLQCELTLCTKMEKHPQKL |
| | | PKCVPPDEACTSLDASIIWAMMQNKKTFTKPLAVIHHEAESKE |
| | | KGPSMKEPNPISPPIFHGLDTLTV |
| SEQ ID NO: | hCH1-hFc Hole- | ASTKGPSVFPLAPSSKSTSGGTAALGCLVKDYFPEPVTVSWNS |
| 192 | 3x4GS-TGFbR2 | GALTSGVHTFPAVLQSSGLYSLSSVVTVPSSSLGTQTYICNVNH |
| | | KPSNTKVDKRVEPKSCDKTHTCPPCPAPELLGGPSVFLFPPKPK |
| | | DTLMISRTPEVTCVVVDVSHEDPEVKFNWYVDGVEVHNAKTK |
| | | PREEQYNSTYRVVSVLTVLHQDWLNGKEYKCKVSNKALPAPI |
| | | EKTISKAKGQPREPQVCTLPPSREEMTKNQVSLSCAVKGFYPSD |
| | | IAVEWESNGQPENNYKTTPPVLDSDGSFFLVSKLTVDKSRWQQ |
| | | GNVFSCSVMHEALHNHYTQKSLSLSPGXGGGGSGGGGSGGGG |
| | | SIPPHVQKSVNNDMIVTDNNGAVKFPQLCKFCDVRFSTCDNQK |
| | | SCMSNCSITSICEKPQEVCVAVWRKNDENITLETVCEDPKLPYE |
| | | DFILEDAASPKCIMKEKKKPGETFFMCSCSSDECNDNIIFSEEYN |
| | | TSNPD, wherein X is K or absent |
| SEQ ID NO: | hCH1-hFc Knob- | ASTKGPSVFPLAPSSKSTSGGTAALGCLVKDYFPEPVTVSWNS |
| 193 | 3x4GS-TGFbR2 | GALTSGVHTFPAVLQSSGLYSLSSVVTVPSSSLGTQTYICNVNH |
| | | KPSNTKVDKRVEPKSCDKTHTCPPCPAPELLGGPSVFLFPPKPK |
| | | DTLMISRTPEVTCVVVDVSHEDPEVKFNWYVDGVEVHNAKTK |
| | | PREEQYNSTYRVVSVLTVLHQDWLNGKEYKCKVSNKALPAPI |
| | | EKTISKAKGQPREPQVYTLPPCREEMTKNQVSLWCLVKGFYPS |
| | | DIAVEWESNGQPENNYKTTPPVLDSDGSFFLYSKLTVDKSRWQ |
| | | QGNVFSCSVMEEALENHYTQKSLSLSPGXGGGGSGGGGSGGG |
| | | GSIPPHVQKSVNNDMIVTDNNGAVKFPQLCKFCDVRFSTCDNQ |
| | | KSCMSNCSITSICEKPQEVCVAVWRKNDENITLETVCHDPKLPY |
| | | HDFILEDAASPKCIMKEKKKPGETFFMCSCSSDECNDNIIFSEEY |
| | | NTSNPD, wherein X is K or absent |
| SEQ ID NO: | hFc Hole-3x4GS- | DKTHTCPPCPAPELLGGPSVFLFPPKPKDTLMISRTPEVTCVVV |
| 194 | TGFbR2 | DVSHEDPEVKFNWYVDGVEVHNAKTKPREEQYNSTYRVVSV |
| | | LTVLHQDWLNGKEYKCKVSNKALPAPIEKTISKAKGQPREPQV |
| | | CTLPPSREEMTKNQVSLSCAVKGFYPSDIAVEWESNGQPENNY |
| | | KTTPPVLDSDGSFFLVSKLTVDKSRWQQGNVFSCSVMHEALH |
| | | NHYTQKSLSLSPGXGGGGSGGGGSGGGGSIPPHVQKSVNNDMI |
| | | VTDNNGAVKFPQLCKFCDVRFSTCDNQKSCMSNCSITSICEKP |
| | | QEVCVAVWRKNDENITLETVCHDPKLPYHDFILEDAASPKCIM |
| | | KEKKKPGETFFMCSCSSDECNDNIIFSEEYNTSNPD, wherein |
| | | X is K or absent |
| SEQ ID NO: | hFc Knob-3x4GS- | DKTHTCPPCPAPELLGGPSVFLFPPKPKDTLMISRTPEVTCVVV |
| 195 | TGFbR2 | DVSHEDPEVKFNWYVDGVEVHNAKTKPREEQYNSTYRVVSV |
| | | LTVLHQDWLNGKEYKCKVSNKALPAPIEKTISKAKGQPREPQV |
| | | YTLPPCREEMTKNQVSLWCLVKGFYPSDIAVEWESNGQPENN |
| | | YKTTPPVLDSDGSFFLYSKLTVDKSRWQQGNVFSCSVMHEAL |
| | | HNHYTQKSLSLSPGXGGGGSGGGGSGGGGSIPPHVQKSVNND |
| | | MIVTDNNGAVKFPQLCKFCDVRFSTCDNQKSCMSNCSITSICEK |
| | | PQEVCVAVWRKNDENITLETVCHDPKLPYHDFILEDAASPKCI |
| | | MKEKKKPGETFFMCSCSSDECNDNIIFSEEYNTSNPD, wherein X |
| | | is K or absent |
| SEQ ID NO: | TGFbR2-3x4GS- | IPPHVQKSVNNDMIVTDNNGAVKFPQLCKFCDVRFSTCDNQKS |
| 196 | hCH1-hFc_Hole | CMSNCSITSICEKPQEVCVAVWRKNDENITLETVCHDPKLPYH |
| | | DFILEDAASPKCIMKEKKKPGETFFMCSCSSDECNDNIIFSEEYN |
| | | TSNPDGGGGSGGGGSGGGGSASTKGPSVFPLAPSSKSTSGGTA |
| | | ALGCLVKDYFPEPVTVSWNSGALTSGVHTFPAVLQSSGLYSLS |
| | | SVVTVPSSSLGTQTYICNVNHKPSNTKVDKRVEPKSCDKTHTC |
| | | PPCPAPELLGGPSVFLFPPKPKDTLMISRTPEVTCVVVDVSHED |
| | | PEVKFNWYVDGVEVHNAKTKPREEQYNSTYRVVSVLTVLHQ |
| | | DWLNGKEYKCKVSNKALPAPIEKTISKAKGQPREPQVCTLPPS |
| | | REEMTKNQVSLSCAVKGFYPSDIAVEWESNGQPENNYKTTPPV |
| | | LDSDGSFFLVSKLTVDKSRWQQGNVFSCSVMHEALHNHYTQK |
| | | SLSLSPGX, wherein X is K or absent |
| SEQ ID NO: | TGFbR2-3x4G5- | IPPHVQKSVNNDMIVTDNNGAVKFPQLCKFCDVRFSTCDNQKS |
| 197 | hCH1-hFc_Knob | CMSNCSITSICEKPQEVCVAVWRKNDENITLETVCHDPKLPYH |
| | | DFILEDAASPKCIMKEKKKPGETFFMCSCSSDECNDNIIFSEEYN |
| | | TSNPDGGGGSGGGGSGGGGSASTKGPSVFPLAPSSKSTSGGTA |
| | | ALGCLVKDYFPEPVTVSWNSGALTSGVHTFPAVLQSSGLYSLS |
| | | SVVTVPSSSLGTQTYICNVNHKPSNTKVDKRVEPKSCDKTHTC |
| | | PPCPAPELLGGPSVFLFPPKPKDTLMISRTPEVTCVVVDVSHED |
| | | PEVKFNWYVDGVEVHNAKTKPREEQYNSTYRVVSVLTVLHQ |
| | | DWLNGKEYKCKVSNKALPAPIEKTISKAKGQPREPQVYTLPPC |
| | | REEMTKNQVSLWCLVKGFYPSDIAVEWESNGQPENNYKTTPP |
| | | VLDSDGSFFLYSKLTVDKSRWQQGNVFSCSVMHEALHNHYTQ |
| | | KSLSLSPGX, wherein X is K or absent |
| SEQ ID NO: | TGFbR2-3x4G5- | IPPHVQKSVNNDMIVTDNNGAVKFPQLCKFCDVRFSTCDNQKS |
| 198 | hCLIg_v1 | CMSNCSITSICEKPQEVCVAVWRKNDENITLETVCHDPKLPYH |
| | | DFILEDAASPKCIMKEKKKPGETFFMCSCSSDECNDNIIFSEEYN |
| | | TSNPDGGGGSGGGGSGGGGSGQPKANPTVTLFPPSSEELQANK |
| | | ATLVCLISDFYPGAVTVAWKADGSPVKAGVETTKPSKQSNNK |
| | | YAASSYLSLTPEQWKSHRSYSCQVTHEGSTVEKTVAPTECS |
| SEQ ID NO: | TGFOR2-3x4G5- | IPPHVQKSVNNDMIVTDNNGAVKFPQLCKFCDVRFSTCDNQKS |
| 199 | hCLIg_vk | CMSNCSITSICEKPQEVCVAVWRKNDENITLETVCHDPKLPYH |
| | | DFILEDAASPKCIMKEKKKPGETFFMCSCSSDECNDNIIFSEEYN |
| | | TSNPDGGGGSGGGGSGGGGSRTVAAPSVFIFPPSDEQLKSGTAS |
| | | VVCLLNNFYPREAKVQWKVDNALQSGNSQESVTEQDSKDSTY |
| | | SLSSTLTLSKADYEKHKVYACEVTHQGLSSPVTKSFNRGEC |

### Cytokine Molecules

[0458] Cytokines are generally polypeptides that influence cellular activity, for example, through signal transduction pathways. Accordingly, a cytokine of the multispecific or multifunctional polypeptide is useful and can be associated with receptor-mediated signaling that transmits a signal from outside the cell membrane to modulate a response within the cell. Cytokines are proteinaceous signaling compounds that are mediators of the immune response. They control many different cellular functions including proliferation, differentiation and cell survival/apoptosis; cytokines are also involved in several pathophysiological processes including viral infections and autoimmune diseases. Cytokines are synthesized under various stimuli by a variety of cells of both the innate (monocytes, macrophages, dendritic cells) and adaptive (T- and B-cells) immune systems. Cytokines can be classified into two groups: pro- and anti-inflammatory. Pro-inflammatory cytokines, including IFNγ, IL-1, IL-6 and TNF-alpha, are predominantly derived from the innate immune cells and Th1 cells. Anti-inflammatory cytokines, including IL-10, IL-4, IL-13 and IL-5, are synthesized from Th2 immune cells.

[0459] The present disclosure provides, inter alia, multispecific (e.g., bi-, tri-, quad-specific) or multifunctional molecules, that include, e.g., are engineered to contain, one or more cytokine molecules, e.g., immunomodulatory (e.g., proinflammatory) cytokines and variants, e.g., functional variants, thereof. Accordingly, in some embodiments, the cytokine molecule is an interleukin or a variant, e.g., a functional variant thereof. In some embodiments the interleukin is a proinflammatory interleukin. In some embodiments the interleukin is chosen from interleukin-2 (IL-2), interleukin-12 (IL-12), interleukin-15 (IL-15), interleukin-18 (IL-18), interleukin-21 (IL-21), interleukin-7 (IL-7), or interferon gamma. In some embodiments, the cytokine molecule is a proinflammatory cytokine.

[0460] In certain embodiments, the cytokine is a single chain cytokine. In certain embodiments, the cytokine is a multichain cytokine (e.g., the cytokine comprises 2 or more (e.g., 2) polypeptide chains. An exemplary multichain cytokine is IL-12.

[0461] Examples of useful cytokines include, but are not limited to, GM-CSF, IL-1α, IL-1β, IL-2, IL-3, IL-4, IL-5, IL-6, IL-7, IL-8, IL-10, IL-12, IL-21, IFN-α, IFN-β, IFN-γ, MIP-1α, MIP-1β, TGF-β, TNF-α, and TNFβ. In one embodiment the cytokine of the multispecific or multifunctional polypeptide is a cytokine selected from the group of GM-CSF, IL-2, IL-7, IL-8, IL-10, IL-12, IL-15, IL-21, IFN-α, IFN-γ, MIP-1α, MIP-1β and TGF-β. In one embodiment the cytokine of the i the multispecific or multifunctional polypeptide is a cytokine selected from the group of IL-2, IL-7, IL-10, IL-12, IL-15, IFN-α, and IFN-γ. In certain embodiments the cytokine is mutated to remove N- and/or O-glycosylation sites. Elimination of glycosylation increases homogeneity of the product obtainable in recombinant production.

[0462] In one embodiment, the cytokine of the multispecific or multifunctional polypeptide is IL-2. In a specific embodiment, the IL-2 cytokine can elicit one or more of the cellular responses selected from the group consisting of: proliferation in an activated T lymphocyte cell, differentiation in an activated T lymphocyte cell, cytotoxic T cell (CTL) activity, proliferation in an activated B cell, differentiation in an activated B cell, proliferation in a natural killer (NK) cell, differentiation in a NK cell, cytokine secretion by an activated T cell or an NK cell, and NK/lymphocyte activated killer (LAK) antitumor cytotoxicity. In another particular embodiment the IL-2 cytokine is a mutant IL-2 cytokine having reduced binding affinity to the .alpha.-subunit of the IL-2 receptor. Together with the .beta.- and .gamma.-subunits (also known as CD122 and CD132, respectively), the .alpha.-subunit (also known as CD25) forms the heterotrimeric high-affinity IL-2 receptor, while the dimeric receptor consisting only of the β- and γ-subunits is termed the intermediate-affinity IL-2 receptor. As described in PCT patent application number PCT/EP2012/051991, which is incorporated herein by reference in its entirety, a mutant IL-2 polypeptide with reduced binding to the .alpha.-subunit of the IL-2 receptor has a reduced ability to induce IL-2 signaling in regulatory T cells, induces less activation-induced cell death (AICD) in T cells, and has a reduced toxicity profile in vivo, compared to a wild-type IL-2 polypeptide. The use of such a cytokine with reduced toxicity is particularly advantageous in a multispecific or multifunctional polypeptide according to the invention, having a long serum half-life due to the presence of an Fc domain. In one embodiment, the mutant IL-2 cytokine of the multispecific or multifunctional polypeptide according to the invention comprises at least one amino acid mutation that reduces or abolishes the affinity of the mutant IL-2 cytokine to the .alpha.-subunit of the IL-2 receptor (CD25) but preserves the affinity of the mutant IL-2 cytokine to the intermediate-affinity IL-2 receptor (consisting of the β and γ subunits of the IL-2 receptor), compared to the non-mutated IL-2 cytokine. In one embodiment the one or more amino acid mutations are amino acid substitutions. In a specific embodiment, the mutant IL-2 cytokine comprises one, two or three amino acid substitutions at one, two or three position(s) selected from the positions corresponding to residue 42, 45, and 72 of human IL-2. In a more specific embodiment, the mutant IL-2 cytokine comprises three amino acid substitutions at the positions corresponding to residue 42, 45 and 72 of human IL-2. In an even more specific embodiment, the mutant IL-2 cytokine is human IL-2 comprising the amino acid substitutions F42A, Y45A and L72G. In one embodiment the mutant IL-2 cytokine additionally comprises an amino acid mutation at a position corresponding to position 3 of human IL-2, which eliminates the O-glycosylation site of IL-2. Particularly, said additional amino acid mutation is an amino acid substitution replacing a threonine residue by an alanine residue. A particular mutant IL-2 cytokine useful in the invention comprises four amino acid substitutions at positions corresponding to residues 3, 42, 45 and 72 of human IL-2. Specific amino acid substitutions are T3A, F42A, Y45A and L72G. As demonstrated in PCT patent application number PCT/EP2012/051991 and in the appended Examples, said quadruple mutant IL-2 polypeptide (IL-2 qm) exhibits no detectable binding to CD25, reduced ability to induce apoptosis in T cells, reduced ability to induce IL-2 signaling in T.sub.reg cells, and a reduced toxicity profile in vivo. However, it retains ability to activate IL-2 signaling in effector cells, to induce proliferation of effector cells, and to generate IFN-γ as a secondary cytokine by NK cells.

[0463] The IL-2 or mutant IL-2 cytokine according to any of the above embodiments may comprise additional mutations that provide further advantages such as increased expression or stability. For example, the cysteine at position 125 may be replaced with a neutral amino acid such as alanine, to avoid the formation of disulfide-bridged IL-2 dimers. Thus, in certain embodiments the IL-2 or mutant IL-2 cytokine of the multispecific or multifunctional polypeptide according to the invention comprises an additional amino acid mutation at a position corresponding to residue 125 of human IL-2. In one embodiment said additional amino acid mutation is the amino acid substitution C125A.

[0464] In a specific embodiment the IL-2 cytokine of the multispecific or multifunctional polypeptide comprises the polypeptide sequence of SEQ ID NO: 237 [APTSSSTKKTQLQLEHLLLDLQMILNGINNYKNPKLTRMLTFKFYMPKKATELKHLQCL EEELKPLEEVLNLAQSKNFHLRPRDLISNINVIVLELKGSETTFMCEYADETATIVEFLNR WITFAQSIISTLT]. In another specific embodiment the IL-2 cytokine of the multispecific or multifunctional polypeptide comprises the polypeptide sequence of SEQ ID NO: 238

[APASSSTKKTQLQLEHLLLDLQMILNGINNYKNPKLTRMLTAKFAMPK
KATELKHLQCLEEELKPLEEVLNGAQSKNFHLRPRDLISNINVIVLELK
GSETTFMCEYADETATIVEFLNRWITFAQSIISTLT].

[0465] In another embodiment the cytokine of the multispecific or multifunctional polypeptide is IL-12. In a specific embodiment said IL-12 cytokine is a single chain IL-12 cytokine. In an even more specific embodiment the single chain IL-12 cytokine comprises the polypeptide sequence of SEQ ID NO: 239 [IWELKKDVYVVELDWYPDAPGEMVVLTCDTPEEDGITWTLDQSSEVLGSGKTLTIQVK EFGDAGQYTCHKGGEVLSHSLLLLHKKEDGIWSTDILKDQKEPKNKTFLRCEAKNYSGR FTCWWLTTISTDLTFSVKSSRGSSDPQGVTCGAATLSAERVRGDNKEYEYSVECQEDSA CPAAEESLPIEVMVDAVHKLKYENYTSSFFIRDIIKPDPPKNLQLKPLKNSRQVEVSWEY PDTWSTPHSYFSLTFCVQVQGKSKREKKDRVFTDKTSATVICRKNASISVRAQDRYYSS SWSEWASVPCSGGGGSGGGGSGGGGSRNLPVATPDPGMFPCLHHSQNLLRAVSNMLQ KARQTLEFYPCTSEEIDHEDITKDKTSTVEACLPLELTKNESCLNSRETSFITNGSCLASRK TSFMMALCLSSIYEDLKMYQVEFKTMNAKLLMDPKRQIFLDQNMLAVIDELMQALNFN SETVPQKSSLEEPDFYKTKIKLCILLHAFRIRAVTIDRVMSYLNAS]. In one embodiment, the IL-12 cytokine can elicit one or more of the cellular responses selected from the group consisting of: proliferation in a NK cell, differentiation in a NK cell, proliferation in a T cell, and differentiation in a T cell.

[0466] In another embodiment the cytokine of the multispecific or multifunctional polypeptide is IL-10. In a specific embodiment said IL-10 cytokine is a single chain IL-10 cytokine. In an even more specific embodiment the single chain IL-10 cytokine comprises the polypeptide sequence of SEQ ID NO: 240 [SPGQGTQSENSCTHFPGNLPNMLRDLRDAFSRVKTFFQMKDQLDNLLLKESLLEDFKG YLGCQALSEMIQFYLEEVMPQAENQDPDIKAHVNSLGENLKTLRLRLRRCHRFLPCENK SKAVEQVKNAFNKLQEKGIYKAMSEFDIFINYIEAYMTMKIRNGGGGSGGGGSGGGGS GGGGSSPGQGTQSENSCTHFPGNLPNMLRDLRDAFSRVKTFFQMKDQLDNLLLKESLLE DFKGYLGCQALSEMIQFYLEEVMPQAENQDPDIKAHVNSLGENLKTLRLRLRRCHRFLP CENKSKAVEQVKNAFNKLQEKGIYKAMSEFDIFINYIEAYMTMKIRN]. In another specific embodiment the IL-10 cytokine is a monomeric IL-10 cytokine. In a more specific embodiment the monomeric IL-10 cytokine comprises the polypeptide sequence of SEQ ID NO: 241 [SPGQGTQSENSCTHFPGNLPNMLRDLRDAFSRVKTFFQMKDQLDNLLLKESLLEDFKG YLGCQALSEMIQFYLEEVMPQAENQDPDIKAHVNSLGENLKTLRLRLRRCHRFLPCENG GGSGGKSKAVEQVKNAFNKLQEKGIYKAMSEFDIFINYIEAYMTMKIRN]. In one embodiment, the IL-10 cytokine can elicit one or more of the cellular responses selected from the group consisting of: inhibition of cytokine secretion, inhibition of antigen presentation by antigen presenting cells, reduction of oxygen radical release, and inhibition of T cell proliferation. A multispecific or multifunctional polypeptide according to the invention wherein the cytokine is IL-10 is particularly useful for downregulation of inflammation, e.g. in the treatment of an inflammatory disorder.

[0467] In another embodiment, the cytokine of the multispecific or multifunctional polypeptide is IL-15. In a specific embodiment said IL-15 cytokine is a mutant IL-15 cytokine having reduced binding affinity to the α-subunit of the IL-15 receptor. Without wishing to be bound by theory, a mutant IL-15 polypeptide with reduced binding to the .alpha.-subunit of the IL-15 receptor has a reduced ability to bind to fibroblasts throughout the body, resulting in improved pharmacokinetics and toxicity profile, compared to a wild-type IL-15 polypeptide. The use of an cytokine with reduced toxicity, such as the described mutant IL-2 and mutant IL-15 effector moieties, is particularly advantageous in a multispecific or multifunctional polypeptide according to the invention, having a long serum half-life due to the presence of an Fc domain. In one embodiment the mutant IL-15 cytokine of the multispecific or multifunctional polypeptide according to the invention comprises at least one amino acid mutation that reduces or abolishes the affinity of the mutant IL-15 cytokine to the .alpha.-subunit of the IL-15 receptor but preserves the affinity of the mutant IL-15 cytokine to the intermediate-affinity IL-15/IL-2 receptor (consisting of the .beta.- and .gamma.-subunits of the IL-15/IL-2 receptor), compared to the non-mutated IL-15 cytokine. In one embodiment the amino acid mutation is an amino acid substitution. In a specific embodiment, the mutant IL-15 cytokine comprises an amino acid substitution at the position corresponding to residue 53 of human IL-15. In a more specific embodiment, the mutant IL-15 cytokine is human IL-15 comprising the amino acid substitution E53A. In one embodiment the mutant IL-15 cytokine additionally comprises an amino acid mutation at a position corresponding to position 79 of human IL-15, which eliminates the N-glycosylation site of IL-15. Particularly, said additional amino acid mutation is an amino acid substitution replacing an asparagine residue by an alanine residue. In an even more specific embodiment the IL-15 cytokine comprises the polypeptide sequence of SEQ ID NO: 242 [NWVNVISDLKKIEDLIQSMHIDATLYTESDVHPSCKVTAMKCFLLELQVISLASGDASIH DTVENLIILANNSLSSNGAVTESGCKECEELEEKNIKEFLQSFVHIVQMFINTS]. In one embodiment, the IL-15 cytokine can elicit one or more of the cellular responses selected from the group consisting of: proliferation in an activated T lymphocyte cell, differentiation in an activated T lymphocyte cell, cytotoxic T cell (CTL) activity, proliferation in an activated B cell, differentiation in an activated B cell, proliferation in a natural killer (NK) cell, differentiation in a NK cell, cytokine secretion by an activated T cell or an NK cell, and NK/lymphocyte activated killer (LAK) antitumor cytotoxicity.

[0468] Mutant cytokine molecules useful as effector moieties in the multispecific or multifunctional polypeptide can be prepared by deletion, substitution, insertion or modification using genetic or chemical methods well known in the art. Genetic methods may include site-specific mutagenesis of the encoding DNA sequence, PCR, gene synthesis, and the like. The correct nucleotide changes can be verified for example by sequencing. Substitution or insertion may involve natural as well as non-natural amino acid residues. Amino acid modification includes well known methods of chemical modification such as the addition or removal of glycosylation sites or carbohydrate attachments, and the like.

[0469] In one embodiment, the cytokine, particularly a single-chain cytokine, of the multispecific or multifunctional polypeptide is GM-CSF. In a specific embodiment, the GM-CSF cytokine can elicit proliferation and/or differentiation in a granulocyte, a monocyte or a dendritic cell. In one embodiment, the cytokine, particularly a single-chain cytokine, of the multispecific or multifunctional polypeptide is IFN-α. In a specific embodiment, the IFN-α cytokine can elicit one or more of the cellular responses selected from the group consisting of: inhibiting viral replication in a virus-infected cell, and upregulating the expression of major histocompatibility complex I (MHC I). In another specific embodiment, the IFN-α cytokine can inhibit proliferation in a tumor cell. In one embodiment the cytokine, particularly a single-chain cytokine, of the multispecific or multifunctional polypeptide is IFNγ. In a specific embodiment, the IFN-γ cytokine can elicit one or more of the cellular responses selected from the group of: increased macrophage activity, increased expression of MHC molecules, and increased NK cell activity. In one embodiment the cytokine, particularly a single-chain cytokine, of the multispecific or multifunctional polypeptide is IL-7. In a specific embodiment, the IL-7 cytokine can elicit proliferation of T and/or B lymphocytes. In one embodiment, the cytokine, particularly a single-chain cytokine, of the multispecific or multifunctional polypeptide is IL-8. In a specific embodiment, the IL-8 cytokine can elicit chemotaxis in neutrophils. In one embodiment, the cytokine, particularly a single-chain cytokine, of the multispecific or multifunctional polypeptide, is MIP-1α. In a specific embodiment, the MIP-1αcytokine can elicit chemotaxis in monocytes and T lymphocyte cells. In one embodiment, the cytokine, particularly a single-chain cytokine, of the multispecific or multifunctional polypeptide is MIP-1β. In a specific embodiment, the MIP-1β cytokine can elicit chemotaxis in monocytes and T lymphocyte cells. In one embodiment, the cytokine, particularly a single-chain cytokine, of the multispecific or multifunctional polypeptide is TGF-β. In a specific embodiment, the TGF-β cytokine can elicit one or more of the cellular responses selected from the group consisting of: chemotaxis in monocytes, chemotaxis in macrophages, upregulation of IL-1 expression in activated macrophages, and upregulation of IgA expression in activated B cells.

[0470] In one embodiment, the multispecific or multifunctional polypeptide of the invention binds to an cytokine receptor with a dissociation constant (K_{D}) that is at least about 1, 1.5, 2, 2.5, 3, 3.5, 4, 4.5, 5, 5.5, 6, 6.5, 7, 7.5, 8, 8.5, 9, 9.5 or 10 times greater than that for a control cytokine. In another embodiment, the multispecific or multifunctional polypeptide binds to an cytokine receptor with a K_{D} that is at least 2, 3, 4, 5, 6, 7, 8, 9, or 10 times greater than that for a corresponding multispecific or multifunctional polypeptide comprising two or more effector moieties. In another embodiment, the multispecific or multifunctional polypeptide binds to an cytokine receptor with a dissociation constant K_{D} that is about 10 times greater than that for a corresponding the multispecific or multifunctional polypeptide comprising two or more cytokines.

[0471] In some embodiments, the multispecific molecules disclosed herein include a cytokine molecule. In embodiments, the cytokine molecule includes a full length, a fragment or a variant of a cytokine; a cytokine receptor domain, e.g., a cytokine receptor dimerizing domain; or an agonist of a cytokine receptor, e.g., an antibody molecule (e.g., an agonistic antibody) to a cytokine receptor.

[0472] In some embodiments the cytokine molecule is chosen from IL-2, IL-12, IL-15, IL-18, IL-7, IL-21, or interferon gamma, or a fragment or variant thereof, or a combination of any of the aforesaid cytokines. The cytokine molecule can be a monomer or a dimer. In embodiments, the cytokine molecule can further include a cytokine receptor dimerizing domain.

[0473] In other embodiments, the cytokine molecule is an agonist of a cytokine receptor, e.g., an antibody molecule (e.g., an agonistic antibody) to a cytokine receptor chosen from an IL-15Ra or IL-21R.

[0474] In one embodiment, the cytokine molecule is IL-15, e.g., human IL-15 (e.g., comprising the amino acid sequence: NWVNVISDLKKIEDLIQSMHIDATLYTESDVHPSCKVTAMKCFLLELQVISLESGDASIH DTVENLIILANNSLSSNGNVTESGCKECEELEEKNIKEFLQSFVHIVQMFINTS (SEQ ID NO: 243), a fragment thereof, or an amino acid sequence substantially identical thereto (e.g., 95% to 99.9% identical thereto, or having at least one amino acid alteration, but not more than five, ten or fifteen alterations (e.g., substitutions, deletions, or insertions, e.g., conservative substitutions) to the amino acid sequence of SEQ ID NO: 243.

[0475] In some embodiments, the cytokine molecule comprises a receptor dimerizing domain, e.g., an IL15Ralpha dimerizing domain. In one embodiment, the IL15Ralpha dimerizing domain comprises the amino acid sequence: MAPRRARGCRTLGLPALLLLLLLRPPATRGITCPPPMSVEHADIWVKSYSLYSRERYICN SGFKRKAGTSSLTECVL (SEQ ID NO: 244), a fragment thereof, or an amino acid sequence substantially identical thereto (e.g., 95% to 99.9% identical thereto, or having at least one amino acid alteration, but not more than five, ten or fifteen alterations (e.g., substitutions, deletions, or insertions, e.g., conservative substitutions) to the amino acid sequence of SEQ ID NO: 244. In some embodiments, the cytokine molecule (e.g., IL-15) and the receptor dimerizing domain (e.g., an IL15Ralpha dimerizing domain) of the multispecific molecule are covalently linked, e.g., via a linker (e.g., a Gly-Ser linker, e.g., a linker comprising the amino acid sequence SGGSGGGGSGGGSGGGGSLQ (SEQ ID NO: 245). In other embodiments, the cytokine molecule (e.g., IL-15) and the receptor dimerizing domain (e.g., an IL15Ralpha dimerizing domain) of the multispecific molecule are not covalently linked, e.g., are non-covalently associated.

[0476] In other embodiments, the cytokine molecule is IL-2, e.g., human IL-2 (e.g., comprising the amino acid sequence: APTSSSTKKTQLQLEHLLLDLQMILNGINNYKNPKLTRMLTFKFYMPKKATELKHLQCL EEELKPLEEVLNLAQSKNFHLRPRDLISNINVIVLELKGSETTFMCEYADETATIVEFLNR WITFCQSIISTLT (SEQ ID NO: 246), a fragment thereof, or an amino acid sequence substantially identical thereto (e.g., 95% to 99.9% identical thereto, or having at least one amino acid alteration, but not more than five, ten or fifteen alterations (e.g., substitutions, deletions, or insertions, e.g., conservative substitutions) to the amino acid sequence of SEQ ID NO: 246).

[0477] In other embodiments, the cytokine molecule is IL-18, e.g., human IL-18 (e.g., comprising the amino acid sequence: YFGKLESKLSVIRNLNDQVLFIDQGNRPLFEDMTDSDCRDNAPRTIFIISMYKDSQPRGM AVTISVKCEKISTLSCENKIISFKEMNPPDNIKDTKSDIIFFQRSVPGHDNKMQFESSSY EGYFLACEKERDLFKLILKKEDELGDRSIMFTVQNED (SEQ ID NO: 247), a fragment thereof, or an amino acid sequence substantially identical thereto (e.g., 95% to 99.9% identical thereto, or having at least one amino acid alteration, but not more than five, ten or fifteen alterations (e.g., substitutions, deletions, or insertions, e.g., conservative substitutions) to the amino acid sequence of SEQ ID NO: 247).

[0478] In other embodiments, the cytokine molecule is IL-21, e.g., human IL-21 (e.g., comprising the amino acid sequence: QGQDRHMIRMRQLIDIVDQLKNYVNDLVPEFLPAPEDVETNCEWSAFSCFQKAQLKSA NTGNNERIINVSIKKLKRKPPSTNAGRRQKHRLTCPSCDSYEKKPPKEFLERFKSLLQKMI HQHLSSRTHGSEDS (SEQ ID NO: 248), a fragment thereof, or an amino acid sequence substantially identical thereto (e.g., 95% to 99.9% identical thereto, or having at least one amino acid alteration, but not more than five, ten or fifteen alterations (e.g., substitutions, deletions, or insertions, e.g., conservative substitutions) to the amino acid sequence of SEQ ID NO: 248).

[0479] In yet other embodiments, the cytokine molecule is interferon gamma, e.g., human interferon gamma (e.g., comprising the amino acid sequence: QDPYVKEAENLKKYFNAGHSDVADNGTLFLGILKNWKEESDRKIMQSQIVSFYFKLFK NFKDDQSIQKSVETIKEDMNVKFFNSNKKKRDDFEKLTNYSVTDLNVQRKAIHELIQVM AELSPAAKTGKRKRSQMLFRG (SEQ ID NO: 249), a fragment thereof, or an amino acid sequence substantially identical thereto (e.g., 95% to 99.9% identical thereto, or having at least one amino acid alteration, but not more than five, ten or fifteen alterations (e.g., substitutions, deletions, or insertions, e.g., conservative substitutions) to the amino acid sequence of SEQ ID NO: 249).

### Nucleic Acids

[0480] The invention also features nucleic acids comprising nucleotide sequences that encode heavy and light chain variable regions and CDRs or hypervariable loops of the antibody molecules, as described herein. For example, the invention features a first and second nucleic acid encoding heavy and light chain variable regions, respectively, of an antibody molecule chosen from one or more of the antibody molecules disclosed herein. The nucleic acid can comprise a nucleotide sequence as set forth in the tables herein, or a sequence substantially identical thereto (e.g., a sequence at least about 85%, 90%, 95%, 99% or more identical thereto, or which differs by no more than 3, 6, 15, 30, or 45 nucleotides from the sequences shown in the tables herein.

[0481] In certain embodiments, the nucleic acid can comprise a nucleotide sequence encoding at least one, two, or three CDRs or hypervariable loops from a heavy chain variable region having an amino acid sequence as set forth in the tables herein, or a sequence substantially homologous thereto (e.g., a sequence at least about 85%, 90%, 95%, 99% or more identical thereto, and/or having one or more substitutions, e.g., conserved substitutions). In other embodiments, the nucleic acid can comprise a nucleotide sequence encoding at least one, two, or three CDRs or hypervariable loops from a light chain variable region having an amino acid sequence as set forth in the tables herein, or a sequence substantially homologous thereto (e.g., a sequence at least about 85%, 90%, 95%, 99% or more identical thereto, and/or having one or more substitutions, e.g., conserved substitutions). In yet another embodiment, the nucleic acid can comprise a nucleotide sequence encoding at least one, two, three, four, five, or six CDRs or hypervariable loops from heavy and light chain variable regions having an amino acid sequence as set forth in the tables herein, or a sequence substantially homologous thereto (e.g., a sequence at least about 85%, 90%, 95%, 99% or more identical thereto, and/or having one or more substitutions, e.g., conserved substitutions).

[0482] In certain embodiments, the nucleic acid can comprise a nucleotide sequence encoding at least one, two, or three CDRs or hypervariable loops from a heavy chain variable region having the nucleotide sequence as set forth in the tables herein, a sequence substantially homologous thereto (e.g., a sequence at least about 85%, 90%, 95%, 99% or more identical thereto, and/or capable of hybridizing under the stringency conditions described herein). In another embodiment, the nucleic acid can comprise a nucleotide sequence encoding at least one, two, or three CDRs or hypervariable loops from a light chain variable region having the nucleotide sequence as set forth in the tables herein, or a sequence substantially homologous thereto (e.g., a sequence at least about 85%, 90%, 95%, 99% or more identical thereto, and/or capable of hybridizing under the stringency conditions described herein). In yet another embodiment, the nucleic acid can comprise a nucleotide sequence encoding at least one, two, three, four, five, or six CDRs or hypervariable loops from heavy and light chain variable regions having the nucleotide sequence as set forth in the tables herein, or a sequence substantially homologous thereto (e.g., a sequence at least about 85%, 90%, 95%, 99% or more identical thereto, and/or capable of hybridizing under the stringency conditions described herein).

[0483] In another aspect, the application features host cells and vectors containing the nucleic acids described herein. The nucleic acids may be present in a single vector or separate vectors present in the same host cell or separate host cell, as described in more detail herein below.

### Vectors

[0484] Further provided herein are vectors comprising the nucleotide sequences encoding an antibody molecule described herein. In one embodiment, the vectors comprise nucleotides encoding an antibody molecule described herein. In one embodiment, the vectors comprise the nucleotide sequences described herein. The vectors include, but are not limited to, a virus, plasmid, cosmid, lambda phage or a yeast artificial chromosome (YAC).

[0485] Numerous vector systems can be employed. For example, one class of vectors utilizes DNA elements which are derived from animal viruses such as, for example, bovine papilloma virus, polyoma virus, adenovirus, vaccinia virus, baculovirus, retroviruses (Rous Sarcoma Virus, MMTV or MOMLV) or SV40 virus. Another class of vectors utilizes RNA elements derived from RNA viruses such as Semliki Forest virus, Eastern Equine Encephalitis virus and Flaviviruses.

[0486] Additionally, cells which have stably integrated the DNA into their chromosomes may be selected by introducing one or more markers which allow for the selection of transfected host cells. The marker may provide, for example, prototropy to an auxotrophic host, biocide resistance (e.g., antibiotics), or resistance to heavy metals such as copper, or the like. The selectable marker gene can be either directly linked to the DNA sequences to be expressed, or introduced into the same cell by cotransformation. Additional elements may also be needed for optimal synthesis of mRNA. These elements may include splice signals, as well as transcriptional promoters, enhancers, and termination signals.

[0487] Once the expression vector or DNA sequence containing the constructs has been prepared for expression, the expression vectors may be transfected or introduced into an appropriate host cell. Various techniques may be employed to achieve this, such as, for example, protoplast fusion, calcium phosphate precipitation, electroporation, retroviral transduction, viral transfection, gene gun, lipid based transfection or other conventional techniques. In the case of protoplast fusion, the cells are grown in media and screened for the appropriate activity.

[0488] Methods and conditions for culturing the resulting transfected cells and for recovering the antibody molecule produced are known to those skilled in the art, and may be varied or optimized depending upon the specific expression vector and mammalian host cell employed, based upon the present description.

### Cells

[0489] In another aspect, the application features host cells and vectors containing the nucleic acids described herein. The nucleic acids may be present in a single vector or separate vectors present in the same host cell or separate host cell. The host cell can be a eukaryotic cell, e.g., a mammalian cell, an insect cell, a yeast cell, or a prokaryotic cell, e.g., E. coli. For example, the mammalian cell can be a cultured cell or a cell line. Exemplary mammalian cells include lymphocytic cell lines (e.g., NSO), Chinese hamster ovary cells (CHO), COS cells, oocyte cells, and cells from a transgenic animal, e.g., mammary epithelial cell. The invention also provides host cells comprising a nucleic acid encoding an antibody molecule as described herein.

[0490] In one embodiment, the host cells are genetically engineered to comprise nucleic acids encoding the antibody molecule.

[0491] In one embodiment, the host cells are genetically engineered by using an expression cassette. The phrase “expression cassette,” refers to nucleotide sequences, which are capable of affecting expression of a gene in hosts compatible with such sequences. Such cassettes may include a promoter, an open reading frame with or without introns, and a termination signal. Additional factors necessary or helpful in effecting expression may also be used, such as, for example, an inducible promoter.

[0492] The invention also provides host cells comprising the vectors described herein.

[0493] The cell can be, but is not limited to, a eukaryotic cell, a bacterial cell, an insect cell, or a human cell. Suitable eukaryotic cells include, but are not limited to, Vero cells, HeLa cells, COS cells, CHO cells, HEK293 cells, BHK cells and MDCKII cells. Suitable insect cells include, but are not limited to, Sf9 cells.

### Uses and Combination Therapies

[0494] The multispecific molecule described herein, alone or in combination with a second therapy or a second therapeutic agent, can be used to treat a hyperproliferative disorder, a cancer, or a fibrotic disorder.

### Cancer

[0495] Methods described herein include treating a cancer in a subject by using a multispecific molecule described herein, e.g., using a pharmaceutical composition described herein. Also provided are methods for reducing or ameliorating a symptom of a cancer in a subject, as well as methods for inhibiting the growth of a cancer and/or killing one or more cancer cells. In embodiments, the methods described herein decrease the size of a tumor and/or decrease the number of cancer cells in a subject administered with a described herein or a pharmaceutical composition described herein.

[0496] In embodiments, the cancer is a hematological cancer. In embodiments, the hematological cancer is a leukemia or a lymphoma. As used herein, a “hematologic cancer” refers to a tumor of the hematopoietic or lymphoid tissues, e.g., a tumor that affects blood, bone marrow, or lymph nodes. Exemplary hematologic malignancies include, but are not limited to, leukemia (e.g., acute lymphoblastic leukemia (ALL), acute myeloid leukemia (AML), chronic lymphocytic leukemia (CLL), chronic myelogenous leukemia (CML), hairy cell leukemia, acute monocytic leukemia (AMoL), chronic myelomonocytic leukemia (CMML), juvenile myelomonocytic leukemia (JMML), or large granular lymphocytic leukemia), lymphoma (e.g., AIDS-related lymphoma, cutaneous T-cell lymphoma, Hodgkin lymphoma (e.g., classical Hodgkin lymphoma or nodular lymphocyte-predominant Hodgkin lymphoma), mycosis fungoides, non-Hodgkin lymphoma (e.g., B-cell non-Hodgkin lymphoma (e.g., Burkitt lymphoma, small lymphocytic lymphoma (CLL/SLL), diffuse large B-cell lymphoma, follicular lymphoma, immunoblastic large cell lymphoma, precursor B-lymphoblastic lymphoma, or mantle cell lymphoma) or T-cell non-Hodgkin lymphoma (mycosis fungoides, anaplastic large cell lymphoma, or precursor T-lymphoblastic lymphoma)), primary central nervous system lymphoma, Sezary syndrome, Waldenström macroglobulinemia), chronic myeloproliferative neoplasm, Langerhans cell histiocytosis, multiple myeloma/plasma cell neoplasm, myelodysplastic syndrome, or myelodysplastic/myeloproliferative neoplasm.

[0497] In embodiments, the cancer is a solid cancer. Exemplary solid cancers include, but are not limited to, ovarian cancer, rectal cancer, stomach cancer, testicular cancer, cancer of the anal region, uterine cancer, colon cancer, rectal cancer, renal-cell carcinoma, liver cancer, non-small cell carcinoma of the lung, cancer of the small intestine, cancer of the esophagus, melanoma, Kaposi's sarcoma, cancer of the endocrine system, cancer of the thyroid gland, cancer of the parathyroid gland, cancer of the adrenal gland, bone cancer, pancreatic cancer, skin cancer, cancer of the head or neck, cutaneous or intraocular malignant melanoma, uterine cancer, brain stem glioma, pituitary adenoma, epidermoid cancer, carcinoma of the cervix squamous cell cancer, carcinoma of the fallopian tubes, carcinoma of the endometrium, carcinoma of the vagina, sarcoma of soft tissue, cancer of the urethra, carcinoma of the vulva, cancer of the penis, cancer of the bladder, cancer of the kidney or ureter, carcinoma of the renal pelvis, spinal axis tumor, neoplasm of the central nervous system (CNS), primary CNS lymphoma, tumor angiogenesis, metastatic lesions of said cancers, or combinations thereof.

[0498] In certain embodiments, the cancer is an epithelial, mesenchymal or hematologic malignancy. In certain embodiments, the cancer treated is a solid tumor (e.g., carcinoid, carcinoma or sarcoma), a soft tissue tumor (e.g., a heme malignancy), and a metastatic lesion, e.g., a metastatic lesion of any of the cancers disclosed herein. In one embodiment, the cancer treated is a fibrotic or desmoplastic solid tumor, e.g., a tumor having one or more of: limited tumor perfusion, compressed blood vessels, fibrotic tumor interstitium, or increased interstitial fluid pressure. In one embodiment, the solid tumor is chosen from one or more of pancreatic (e.g., pancreatic adenocarcinoma or pancreatic ductal adenocarcinoma), breast, colon, colorectal, lung (e.g., small cell lung cancer (SCLC) or non-small cell lung cancer (NSCLC)), skin, ovarian, liver cancer, esophageal cancer, endometrial cancer, gastric cancer, head and neck cancer, kidney, or prostate cancer.

[0499] Examples of cancer include, but are not limited to, carcinoma, lymphoma, blastoma, sarcoma, and leukemia or lymphoid malignancies. More particular examples of such cancers are noted below and include: squamous cell cancer (e.g. epithelial squamous cell cancer), lung cancer including small-cell lung cancer, non-small cell lung cancer, adenocarcinoma of the lung and squamous carcinoma of the lung, cancer of the peritoneum, hepatocellular cancer, gastric or stomach cancer including gastrointestinal cancer, pancreatic cancer, glioblastoma, cervical cancer, ovarian cancer, liver cancer, bladder cancer, hepatoma, breast cancer, colon cancer, rectal cancer, colorectal cancer, endometrial cancer or uterine carcinoma, salivary gland carcinoma, kidney or renal cancer, prostate cancer, vulval cancer, thyroid cancer, hepatic carcinoma, anal carcinoma, penile carcinoma, as well as head and neck cancer. The term “cancer” includes primary malignant cells or tumors (e.g., those whose cells have not migrated to sites in the subject's body other than the site of the original malignancy or tumor) and secondary malignant cells or tumors (e.g., those arising from metastasis, the migration of malignant cells or tumor cells to secondary sites that are different from the site of the original tumor).

[0500] Other examples of cancers or malignancies include, but are not limited to: Acute Childhood Lymphoblastic Leukemia, Acute Lymphoblastic Leukemia, Acute Lymphocytic Leukemia, Acute Myeloid Leukemia, Adrenocortical Carcinoma, Adult (Primary) Hepatocellular Cancer, Adult (Primary) Liver Cancer, Adult Acute Lymphocytic Leukemia, Adult Acute Myeloid Leukemia, Adult Hodgkin's Disease, Adult Hodgkin's Lymphoma, Adult Lymphocytic Leukemia, Adult Non-Hodgkin's Lymphoma, Adult Primary Liver Cancer, Adult Soft Tissue Sarcoma, AIDS-Related Lymphoma, AIDS-Related Malignancies, Anal Cancer, Astrocytoma, Bile Duct Cancer, Bladder Cancer, Bone Cancer, Brain Stem Glioma, Brain Tumors, Breast Cancer, Cancer of the Renal Pelvis and Ureter, Central Nervous System (Primary) Lymphoma, Central Nervous System Lymphoma, Cerebellar Astrocytoma, Cerebral Astrocytoma, Cervical Cancer, Childhood (Primary) Hepatocellular Cancer, Childhood (Primary) Liver Cancer, Childhood Acute Lymphoblastic Leukemia, Childhood Acute Myeloid Leukemia, Childhood Brain Stem Glioma, Childhood Cerebellar Astrocytoma, Childhood Cerebral Astrocytoma, Childhood Extracranial Germ Cell Tumors, Childhood Hodgkin's Disease, Childhood Hodgkin's Lymphoma, Childhood Hypothalamic and Visual Pathway Glioma, Childhood Lymphoblastic Leukemia, Childhood Medulloblastoma, Childhood Non-Hodgkin's Lymphoma, Childhood Pineal and Supratentorial Primitive Neuroectodermal Tumors, Childhood Primary Liver Cancer, Childhood Rhabdomyosarcoma, Childhood Soft Tissue Sarcoma, Childhood Visual Pathway and Hypothalamic Glioma, Chronic Lymphocytic Leukemia, Chronic Myelogenous Leukemia, Colon Cancer, Cutaneous T-Cell Lymphoma, Endocrine Pancreas Islet Cell Carcinoma, Endometrial Cancer, Ependymoma, Epithelial Cancer, Esophageal Cancer, Ewing's Sarcoma and Related Tumors, Exocrine Pancreatic Cancer, Extracranial Germ Cell Tumor, Extragonadal Germ Cell Tumor, Extrahepatic Bile Duct Cancer, Eye Cancer, Female Breast Cancer, Gaucher's Disease, Gallbladder Cancer, Gastric Cancer, Gastrointestinal Carcinoid Tumor, Gastrointestinal Tumors, Germ Cell Tumors, Gestational Trophoblastic Tumor, Hairy Cell Leukemia, Head and Neck Cancer, Hepatocellular Cancer, Hodgkin's Disease, Hodgkin's Lymphoma, Hypergammaglobulinemia, Hypopharyngeal Cancer, Intestinal Cancers, Intraocular Melanoma, Islet Cell Carcinoma, Islet Cell Pancreatic Cancer, Kaposi's Sarcoma, Kidney Cancer, Laryngeal Cancer, Lip and Oral Cavity Cancer, Liver Cancer, Lung Cancer, Lymphoproliferative Disorders, Macroglobulinemia, Male Breast Cancer, Malignant Mesothelioma, Malignant Thymoma, Medulloblastoma, Melanoma, Mesothelioma, Metastatic Occult Primary Squamous Neck Cancer, Metastatic Primary Squamous Neck Cancer, Metastatic Squamous Neck Cancer, Multiple Myeloma, Multiple Myeloma/Plasma Cell Neoplasm, Myelodysplastic Syndrome, Myelogenous Leukemia, Myeloid Leukemia, Myeloproliferative Disorders, Nasal Cavity and Paranasal Sinus Cancer, Nasopharyngeal Cancer, Neuroblastoma, Non-Hodgkin's Lymphoma During Pregnancy, Nonmelanoma Skin Cancer, Non-Small Cell Lung Cancer, Occult Primary Metastatic Squamous Neck Cancer, Oropharyngeal Cancer, Osteo-/Malignant Fibrous Sarcoma, Osteosarcoma/Malignant Fibrous Histiocytoma, Osteosarcoma/Malignant Fibrous Histiocytoma of Bone, Ovarian Epithelial Cancer, Ovarian Germ Cell Tumor, Ovarian Low Malignant Potential Tumor, Pancreatic Cancer, Paraproteinemias, Purpura, Parathyroid Cancer, Penile Cancer, Pheochromocytoma, Pituitary Tumor, Plasma Cell Neoplasm/Multiple Myeloma, Primary Central Nervous System Lymphoma, Primary Liver Cancer, Prostate Cancer, Rectal Cancer, Renal Cell Cancer, Renal Pelvis and Ureter Cancer, Retinoblastoma, Rhabdomyosarcoma, Salivary Gland Cancer, Sarcoidosis Sarcomas, Sezary Syndrome, Skin Cancer, Small Cell Lung Cancer, Small Intestine Cancer, Soft Tissue Sarcoma, Squamous Neck Cancer, Stomach Cancer, Supratentorial Primitive Neuroectodermal and Pineal Tumors, T-Cell Lymphoma, Testicular Cancer, Thymoma, Thyroid Cancer, Transitional Cell Cancer of the Renal Pelvis and Ureter, Transitional Renal Pelvis and Ureter Cancer, Trophoblastic Tumors, Ureter and Renal Pelvis Cell Cancer, Urethral Cancer, Uterine Cancer, Uterine Sarcoma, Vaginal Cancer, Visual Pathway and Hypothalamic Glioma, Vulvar Cancer, Waldenström's Macroglobulinemia, Wilms' Tumor, and any other hyperproliferative disease, besides neoplasia, located in an organ system listed above.

[0501] In other embodiments, the multispecific molecule, as described above and herein, is used to treat a hyperproliferative disorder, e.g., a hyperproliferative connective tissue disorder (e.g., a hyperproliferative fibrotic disease). In one embodiment, the hyperproliferative fibrotic disease is multisystemic or organ-specific. Exemplary hyperproliferative fibrotic diseases include, but are not limited to, multisystemic (e.g., systemic sclerosis, multifocal fibrosclerosis, sclerodermatous graft-versus-host disease in bone marrow transplant recipients, nephrogenic systemic fibrosis, scleroderma), and organ-specific disorders (e.g., fibrosis of the eye, lung, liver, heart, kidney, pancreas, skin and other organs). In other embodiments, the disorder is chosen from liver cirrhosis or tuberculosis. In other embodiments, the disorder is leprosy.

[0502] In embodiments, the multispecific molecules (or pharmaceutical composition) are administered in a manner appropriate to the disease to be treated or prevented. The quantity and frequency of administration will be determined by such factors as the condition of the patient, and the type and severity of the patient's disease. Appropriate dosages may be determined by clinical trials. For example, when “an effective amount” or “a therapeutic amount” is indicated, the precise amount of the pharmaceutical composition (or multispecific molecules) to be administered can be determined by a physician with consideration of individual differences in tumor size, extent of infection or metastasis, age, weight, and condition of the subject. In embodiments, the pharmaceutical composition described herein can be administered at a dosage of 10⁴ to 10⁹ cells/kg body weight, e.g., 10⁵ to 10⁶ cells/kg body weight, including all integer values within those ranges. In embodiments, the pharmaceutical composition described herein can be administered multiple times at these dosages. In embodiments, the pharmaceutical composition described herein can be administered using infusion techniques described in immunotherapy (see, e.g., Rosenberg et al., New Eng. J. of Med. 319:1676, 1988).

[0503] In embodiments, the multispecific molecules or pharmaceutical composition is administered to the subject parenterally. In embodiments, the cells are administered to the subject intravenously, subcutaneously, intratumorally, intranodally, intramuscularly, intradermally, or intraperitoneally. In embodiments, the cells are administered, e.g., injected, directly into a tumor or lymph node. In embodiments, the cells are administered as an infusion (e.g., as described in Rosenberg et al., New Eng. J. of Med. 319:1676, 1988) or an intravenous push. In embodiments, the cells are administered as an injectable depot formulation.

[0504] In embodiments, the subject is a mammal. In embodiments, the subject is a human, monkey, pig, dog, cat, cow, sheep, goat, rabbit, rat, or mouse. In embodiments, the subject is a human. In embodiments, the subject is a pediatric subject, e.g., less than 18 years of age, e.g., less than 17, 16, 15, 14, 13, 12, 11, 10, 9, 8, 7, 6, 5, 4, 3, 2, 1 or less years of age. In embodiments, the subject is an adult, e.g., at least 18 years of age, e.g., at least 19, 20, 21, 22, 23, 24, 25, 25-30, 30-35, 35-40, 40-50, 50-60, 60-70, 70-80, or 80-90 years of age.

### Liver Conditions or Disorders

[0505] This invention also provides methods of treating liver conditions or disorders using the multispecific molecules or pharmaceutical compositions described herein.

[0506] As used herein, “liver disorder therapy” refers to therapies or therapeutic agents used to treat or prevent a liver disorder described herein, and therefore encompasses liver cancer therapies and other liver disorder therapies, e.g., therapies for fibrotic liver disorders, fatty liver diseases, liver inflammation disorders, autoimmune liver diseases, and liver disorders induced by genetic diseases, alcoholism, drug toxicity, infection, or injury.

[0507] Examples of liver cancers include: hepatocellular carcinoma (HCC), primary liver cell carcinoma, hepatoma, fibrolamellar carcinoma, focal nodular hyperplasia, cholangiosarcoma, intrahepatic bile duct cancer, angiosarcoma or hemangiosarcoma, hepatic adenoma, hepatic hemangiomas, hepatic hamartoma, hepatoblastoma, infantile hemangioendothelialoma, mixed tumors of the liver, tumors of mesenchymal tissue, sarcoma of the liver. Examples of cancers that may metastasize to the liver include: breast cancer, colorectal cancer, esophageal cancer, kidney or renal cancer, lung cancer, ovarian cancer, pancreatic cancer, rectal cancer, skin cancer (e.g., melanoma), gastric or stomach cancer (including gastrointestinal cancer), and uterine cancer.

[0508] In an embodiment, the liver disorder is a fibrotic disorder or connective tissue disorder affecting the function or physiology of the liver. In one embodiment, the fibrotic disorder or connective tissue disorder can be systemic (affecting the whole body), multi-organ, or organ-specific (e.g., liver-specific). Examples of fibrotic liver disorders include liver fibrosis (hepatic fibrosis), liver cirrhosis, and any disorder associated with accumulation of extracellular matrix proteins, e.g., collagen, in the liver, liver scarring, and/or abnormal hepatic vasculature. Liver fibrosis is caused by liver inflammation or damage which triggers the accumulation of extracellular matrix proteins, including collagens, and scar tissue in the liver. Liver cirrhosis is the end stage of liver fibrosis, involves regenerative nodules (as a result of repair processes), and is accompanied with the distortion of the hepatic vasculature. Liver fibrotic disorders are most commonly caused by chronic viral infection (e.g., hepatitis B, hepatitis C), alcoholism, and fatty liver disease.

[0509] Examples of fatty liver diseases include fatty liver (or FLD), alcoholic liver disease, non-alcoholic fatty liver disease (NAFLD), non-alcoholic steatohepatitis (NASH), alcoholic steatohepatitis, simple steatosis, Reye's syndrome, and any disorder associated with abnormal retention of lipids in liver cells.

[0510] In one embodiment, the liver disease is NASH.

[0511] Metabolic disorders can also affect the liver and cause liver damage. Examples of metabolic disorders of the liver or affecting the liver include hemochromatosis, diabetes, obesity, hypertension, dyslipidemia, galactosemia, and glycogen storage disease.

[0512] Autoimmune disorders of the liver or affecting the liver can include systemic disorders or disorders that primarily affect an organ other than the liver, but with secondary effects to liver cells or liver function. Examples of such autoimmune disorders include autoimmune hepatitis (AIH), autoimmune liver disease, lupoid hepatitis, systemic lupus erythematosus, primary biliary cirrhosis (PBC), scleroderma, and systemic scerlosis.

### Fibrotic Conditions or Disorders

[0513] In another aspect, the invention features a method of treating or preventing a fibrotic condition or disorder in a subject. The method includes administering the multispecific molecule, as a single agent or in combination with another agent or therapeutic modality, to a subject in need thereof, in an amount sufficient to decrease or inhibit the fibrotic condition in the subject.

[0514] In certain embodiments, reducing fibrosis, or treatment of a fibrotic condition, includes reducing or inhibiting one or more of: formation or deposition of tissue fibrosis; reducing the size, cellularity (e.g., fibroblast or immune cell numbers), composition; or cellular content, of a fibrotic lesion; reducing the collagen or hydroxyproline content, of a fibrotic lesion; reducing expression or activity of a fibrogenic protein; reducing fibrosis associated with an inflammatory response; decreasing weight loss associated with fibrosis; or increasing survival.

[0515] In certain embodiments, the fibrotic condition is primary fibrosis. In one embodiment, the fibrotic condition is idiopathic. In other embodiments, the fibrotic condition is associated with (e.g., is secondary to) a disease (e.g., an infectious disease, an inflammatory disease, an autoimmune disease, a malignant or cancerous disease, and/or a connective disease); a toxin; an insult (e.g., an environmental hazard (e.g., asbestos, coal dust, polycyclic aromatic hydrocarbons), cigarette smoking, a wound); a medical treatment (e.g., surgical incision, chemotherapy or radiation), or a combination thereof.

[0516] In certain embodiments, the fibrotic condition is a fibrotic condition of the lung, a fibrotic condition of the liver (e.g., as described herein), a fibrotic condition of the heart or vasculature, a fibrotic condition of the kidney, a fibrotic condition of the skin, a fibrotic condition of the gastrointestinal tract, a fibrotic condition of the bone marrow or a hematopoietic tissue, a fibrotic condition of the nervous system, a fibrotic condition of the eye, or a combination thereof.

[0517] In certain embodiments, the fibrotic condition is a fibrotic condition of the lung. In certain embodiments, the fibrotic condition of the lung is chosen from one or more of: pulmonary fibrosis, idiopathic pulmonary fibrosis (IPF), usual interstitial pneumonitis (UIP), interstitial lung disease, cryptogenic fibrosing alveolitis (CFA), bronchiectasis, and scleroderma lung disease. In one embodiment, the fibrosis of the lung is secondary to a disease, a toxin, an insult, a medical treatment, or a combination thereof. For example, the fibrosis of the lung can be associated with (e.g., secondary to) one or more of: a disease process such as asbestosis and silicosis; an occupational hazard; an environmental pollutant; cigarette smoking; an autoimmune connective tissue disorders (e.g., rheumatoid arthritis, scleroderma and systemic lupus erythematosus (SLE)); a connective tissue disorder such as sarcoidosis; an infectious disease, e.g., infection, particularly chronic infection; a medical treatment, including but not limited to, radiation therapy, and drug therapy, e.g., chemotherapy (e.g., treatment with as bleomycin, methotrexate, amiodarone, busulfan, and/or nitrofurantoin). In one embodiment, the fibrotic condition of the lung treated with the methods of the invention is associated with (e.g., secondary to) a cancer treatment, e.g., treatment of a cancer (e.g., squamous cell carcinoma, testicular cancer, Hodgkin's disease with bleomycin). In one embodiment, the fibrotic condition of the lung is associated with an autoimmune connective tissue disorder (e.g., scleroderma or lupus, e.g., SLE).

[0518] Pulmonary fibrosis can occur as a secondary effect in disease processes such as asbestosis and silicosis, and is known to be more prevalent in certain occupations such as coal miner, ship workers and sand blasters where exposure to environmental pollutants is an occupational hazard (Green, F H et al. (2007) Toxicol Pathol. 35:136-47). Other factors that contribute to pulmonary fibrosis include cigarette smoking, and autoimmune connective tissue disorders, like rheumatoid arthritis, scleroderma and systemic lupus erythematosus (SLE) (Leslie, K O et al. (2007) Semin Respir Crit Care Med. 28:369-78; Swigris, J J et al. (2008) Chest. 133:271-80; and Antoniou, K M et al. (2008) Curr Opin Rheumatol. 20:686-91). Other connective tissue disorders such as sarcoidosis can include pulmonary fibrosis as part of the disease (Paramothayan, S et al. (2008) Respir Med. 102:1-9), and infectious diseases of the lung can cause fibrosis as a long term consequence of infection, particularly chronic infections.

[0519] Pulmonary fibrosis can also be a side effect of certain medical treatments, particularly radiation therapy to the chest and certain medicines like bleomycin, methotrexate, amiodarone, busulfan, and nitrofurantoin (Catane, R et al. (1979) Int J Radiat Oncol Biol Phys. 5:1513-8; Zisman, D A et al. (2001) Sarcoidosis Vasc Diffuse Lung Dis. 18:243-52; Rakita, L et al. (1983) Am Heart J. 106:906-16; Twohig, K J et al. (1990) Clin Chest Med. 11:31-54; and Witten C M. (1989) Arch Phys Med Rehabil. 70:55-7). In other embodiments, idiopathic pulmonary fibrosis can occur where no clear causal agent or disease can be identified. Genetic factors can play a significant role in these cases of pulmonary fibrosis (Steele, M P et al. (2007) Respiration 74:601-8; Brass, D M et al. (2007) Proc Am Thorac Soc. 4:92-100 and du Bois R M. (2006) Semin Respir Crit Care Med. 27:581-8).

[0520] In other embodiments, pulmonary fibrosis includes, but is not limited to, pulmonary fibrosis associated with chronic obstructive pulmonary disease (COPD), acute respiratory distress syndrome, scleroderma, pleural fibrosis, chronic asthma, acute lung syndrome, amyloidosis, bronchopulmonary dysplasia, Caplan's disease, Dressler's syndrome, histiocytosis X, idiopathic pulmonary haemosiderosis, lymphangiomyomatosis, mitral valve stenosis, polymyositis, pulmonary edema, pulmonary hypertension (e.g., idiopathic pulmonary hypertension (IPH)), pneumoconiosis, radiotherapy (e.g., radiation induced fibrosis), rheumatoid disease, Shaver's disease, systemic lupus erythematosus, systemic sclerosis, tropical pulmonary eosinophilia, tuberous sclerosis, Weber-Christian disease, Wegener's granulomatosis, Whipple's disease, or exposure to toxins or irritants (e.g., pharmaceutical drugs such as amiodarone, bleomycin, busulphan, carmustine, chloramphenicol, hexamethonium, methotrexate, methysergide, mitomycin C, nitrofurantoin, penicillamine, peplomycin, and practolol; inhalation of talc or dust, e.g., coal dust, silica). In certain embodiments, the pulmonary fibrosis is associated with an inflammatory disorder of the lung, e.g., asthma, and/or COPD.

[0521] In certain embodiments, the fibrotic condition is a fibrotic condition of the liver. In certain embodiments, the fibrotic condition of the liver is chosen from one or more of: fatty liver disease, steatosis (e.g., nonalcoholic steatohepatitis (NASH), cholestatic liver disease (e.g., primary biliary cirrhosis (PBC)), cirrhosis, alcohol induced liver fibrosis, biliary duct injury, biliary fibrosis, or cholangiopathies. In other embodiments, hepatic or liver fibrosis includes, but is not limited to, hepatic fibrosis associated with alcoholism, viral infection, e.g., hepatitis (e.g., hepatitis C, B or D), autoimmune hepatitis, non-alcoholic fatty liver disease (NAFLD), progressive massive fibrosis, exposure to toxins or irritants (e.g., alcohol, pharmaceutical drugs and environmental toxins). Additional examples of liver conditions and disorders are provided in the Sections entitled “Liver Conditions or Disorders,” provided herein.

[0522] In certain embodiments, the fibrotic condition is a fibrotic condition of the kidney. In certain embodiments, the fibrotic condition of the kidney is chosen from one or more of: renal fibrosis (e.g., chronic kidney fibrosis), nephropathies associated with injury/fibrosis (e.g., chronic nephropathies associated with diabetes (e.g., diabetic nephropathy)), lupus, scleroderma of the kidney, glomerular nephritis, focal segmental glomerular sclerosis, IgA nephropathyrenal fibrosis associated with human chronic kidney disease (CKD), chronic progressive nephropathy (CPN), tubulointerstitial fibrosis, ureteral obstruction, chronic uremia, chronic interstitial nephritis, radiation nephropathy, glomerulosclerosis, progressive glomerulonephrosis (PGN), endothelial/thrombotic microangiopathy injury, HIV-associated nephropathy, or fibrosis associated with exposure to a toxin, an irritant, or a chemotherapeutic agent. In one embodiment, the fibrotic condition of the kidney is scleroderma of the kidney. In some embodiments, the fibrotic condition of the kidney is transplant nephropathy, diabetic nephropathy, lupus nephritis, focal segmental glomerulosclerosis (FSGS), endothelial/thrombotic microangiopathy injury, scleroderma of the kidney, HIV-associated nephropathy (HIVVAN), or exposure to toxins, irritants, chemotherapeutic agents.

[0523] In certain embodiments, the fibrotic condition is a fibrotic condition of the bone marrow or a hematopoietic tissue. In certain embodiments, the fibrotic condition of the bone marrow is an intrinsic feature of a chronic myeloproliferative neoplasm of the bone marrow, such as primary myelofibrosis (also referred to herein as agnogenic myeloid metaplasia or chronic idiopathic myelofibrosis). In other embodiments, the bone marrow fibrosis is associated with (e.g., is secondary to) a malignant condition or a condition caused by a clonal proliferative disease. In other embodiments, the bone marrow fibrosis is associated with a hematologic disorder (e.g., a hematologic disorder chosen from one or more of polycythemia vera, essential thrombocythemia, myelodysplasia, hairy cell leukemia, lymphoma (e.g., Hodgkin or non-Hodgkin lymphoma), multiple myeloma or chronic myelogeneous leukemia (CML)). In yet other embodiments, the bone marrow fibrosis is associated with (e.g., secondary to) a non-hematologic disorder (e.g., a non-hematologic disorder chosen from solid tumor metastasis to bone marrow, an autoimmune disorder (e.g., systemic lupus erythematosus, scleroderma, mixed connective tissue disorder, or polymyositis), an infection (e.g., tuberculosis or leprosy), or secondary hyperparathyroidism associated with vitamin D deficiency. In some embodiments, the fibrotic condition is idiopathic or drug-induced myelofibrosis. In some embodiments, the fibrotic condition of the bone marrow or hematopoietic tissue is associated with systemic lupus erythematosus or scleroderma.

[0524] In other embodiments, the fibrotic condition is associated with leprosy or tuberculosis.

[0525] In certain embodiments, the fibrotic condition is a fibrotic condition of the bone marrow. In certain embodiments, the fibrotic condition of the bone marrow is myelofibrosis (e.g., primary myelofibrosis (PMF)), myeloid metaplasia, chronic idiopathic myelofibrosis, or primary myelofibrosis. In other embodiments, bone marrow fibrosis is associated with a hematologic disorder chosen from one or more of hairy cell leukemia, lymphoma, or multiple myeloma.

[0526] In other embodiments, the bone marrow fibrosis is associated with one or more myeloproliferative neoplasms (MPN) chosen from: essential thrombocythemia (ET), polycythemia vera (PV), mastocytosis, chronic eosinophilic leukemia, chronic neutrophilic leukemia, or other MPN.

[0527] In one embodiment, the fibrotic condition is primary myelofibrosis. Primary myelofibrosis (PMF) (also referred to in the literature as idiopathic myeloid metaplasia, and Agnogenic myeloid metaplasia) is a clonal disorder of multipotent hematopoietic progenitor cells (reviewed in Abdel-Wahab, O. et al. (2009) Annu. Rev. Med. 60:233-45; Varicchio, L. et al. (2009) Expert Rev. Hematol. 2(3):315-334; Agrawal, M. et al. (2010) Cancer 1-15).

[0528] In certain embodiments, the fibrotic condition is a fibrotic condition of the heart. In certain embodiments, the fibrotic condition of the heart is myocardial fibrosis (e.g., myocardial fibrosis associated with radiation myocarditis, a surgical procedure complication (e.g., myocardial post-operative fibrosis), infectious diseases (e.g., Chagas disease, bacterial, trichinosis or fungal myocarditis)); granulomatous, metabolic storage disorders (e.g., cardiomyopathy, hemochromatosis); developmental disorders (e.g, endocardial fibroelastosis); arteriosclerotic, or exposure to toxins or irritants (e.g., drug induced cardiomyopathy, drug induced cardiotoxicity, alcoholic cardiomyopathy, cobalt poisoning or exposure). In certain embodiments, the myocardial fibrosis is associated with an inflammatory disorder of cardiac tissue (e.g., myocardial sarcoidosis). In some embodiments, the fibrotic condition is a fibrotic condition associated with a myocardial infarction. In some embodiments, the fibrotic condition is a fibrotic condition associated with congestive heart failure.

[0529] In some embodiments, the fibrotic condition is associated with an autoimmune disease selected from scleroderma or lupus, e.g., systemic lupus erythematosus.

[0530] In some embodiments, the fibrotic condition is systemic. In some embodiments, the fibrotic condition is systemic sclerosis (e.g., limited systemic sclerosis, diffuse systemic sclerosis, or systemic sclerosis sine scleroderma), nephrogenic systemic fibrosis, cystic fibrosis, chronic graft vs. host disease, or atherosclerosis.

[0531] In some embodiments, the fibrotic condition is scleroderma. In some embodiments, the scleroderma is localized, e.g., morphea or linear scleroderma. In some embodiments, the condition is a systemic sclerosis, e.g., limited systemic sclerosis, diffuse systemic sclerosis, or systemic sclerosis sine scleroderma.

[0532] In other embodiment, the fibrotic condition affects a tissue chosen from one or more of muscle, tendon, cartilage, skin (e.g., skin epidermis or endodermis), cardiac tissue, vascular tissue (e.g., artery, vein), pancreatic tissue, lung tissue, liver tissue, kidney tissue, uterine tissue, ovarian tissue, neural tissue, testicular tissue, peritoneal tissue, colon, small intestine, biliary tract, gut, bone marrow, hematopoietic tissue, or eye (e.g., retinal) tissue.

[0533] In some embodiments, the fibrotic condition is a fibrotic condition of the eye. In some embodiments, the fibrotic condition is glaucoma, macular degeneration (e.g., age-related macular degeneration), macular edema (e.g., diabetic macular edema), retinopathy (e.g., diabetic retinopathy), or dry eye disease.

[0534] In certain embodiments, the fibrotic condition is a fibrotic condition of the skin. In certain embodiments, the fibrotic condition of the skin is chosen from one or more of: skin fibrosis (e.g., hypertrophic scarring, keloid), scleroderma, nephrogenic systemic fibrosis (e.g., resulting after exposure to gadolinium (which is frequently used as a contrast substance for MRIs) in patients with severe kidney failure), and keloid.

[0535] In certain embodiments, the fibrotic condition is a fibrotic condition of the gastrointestinal tract. In certain embodiments, the fibrotic condition is chosen from one or more of: fibrosis associated with scleroderma; radiation induced gut fibrosis; fibrosis associated with a foregut inflammatory disorder such as Barrett's esophagus and chronic gastritis, and/or fibrosis associated with a hindgut inflammatory disorder, such as inflammatory bowel disease (IBD), ulcerative colitis and Crohn's disease. In some embodiments, the fibrotic condition of the gastrointestinal tract is fibrosis associated with scleroderma.

[0536] In one embodiment, the fibrotic condition is a chronic fibrotic condition or disorder. In certain embodiments, the fibrotic condition is associated with an inflammatory condition or disorder.

[0537] In some embodiments, the fibrotic and/or inflammatory condition is osteomyelitis, e.g., chronic osteomyelitis.

[0538] In some embodiments, the fibrotic condition is an amyloidosis. In certain embodiments, the amyloidosis is associated with chronic osteomyelitis.

[0539] In some embodiments, the one or more compositions described herein is administered in combination with one or more other therapeutic agents. Exemplary therapeutic agents include, but are not limited to, anti-fibrotics, corticosteroids, antiinflammatories, immunosuppressants, chemotherapeutic agents, anti-metabolites, and immunomodulators.

[0540] An example of suitable therapeutics for use in combination with the composition(s) for treatment of liver fibrosis includes, but is not limited to, adefovir dipivoxil, candesartan, colchicine, combined ATG, mycophenolate mofetil, and tacrolimus, combined cyclosporine microemulsion and tacrolimus, elastometry, everolimus, FG-3019, Fuzheng Huayu, GI262570, glycyrrhizin (monoammonium glycyrrhizinate, glycine, L-cysteine monohydrochloride), interferon gamma-1b, irbesartan, losartan, oltipraz, ORAL IMPACT®, peginterferon alfa-2a, combined peginterferon alfa-2a and ribavirin, peginterferon alfa-2b (SCH 54031), combined peginterferon alpha-2b and ribavirin, praziquantel, prazosin, raltegravir, ribavirin (REBETOL®, SCH 18908), ritonavir-boosted protease inhibitor, pentoxyphilline, tacrolimus, tauroursodeoxycholic acid, tocopherol, ursodiol, warfarin, and combinations thereof.

### Combination Therapies

[0541] The multispecific molecules disclosed herein can be used in combination with a second therapeutic agent or procedure.

[0542] In embodiments, the multispecific molecule and the second therapeutic agent or procedure are administered/performed after a subject has been diagnosed with a cancer, e.g., before the cancer has been eliminated from the subject. In embodiments, the multispecific molecule and the second therapeutic agent or procedure are administered/performed simultaneously or concurrently. For example, the delivery of one treatment is still occurring when the delivery of the second commences, e.g., there is an overlap in administration of the treatments. In other embodiments, the multispecific molecule and the second therapeutic agent or procedure are administered/performed sequentially. For example, the delivery of one treatment ceases before the delivery of the other treatment begins.

[0543] In embodiments, combination therapy can lead to more effective treatment than monotherapy with either agent alone. In embodiments, the combination of the first and second treatment is more effective (e.g., leads to a greater reduction in symptoms and/or cancer cells) than the first or second treatment alone. In embodiments, the combination therapy permits use of a lower dose of the first or the second treatment compared to the dose of the first or second treatment normally required to achieve similar effects when administered as a monotherapy. In embodiments, the combination therapy has a partially additive effect, wholly additive effect, or greater than additive effect.

[0544] In one embodiment, the multispecific molecule is administered in combination with a therapy, e.g., a cancer therapy (e.g., one or more of anti-cancer agents, immunotherapy, photodynamic therapy (PDT), surgery and/or radiation). The terms “chemotherapeutic,” “chemotherapeutic agent,” and “anti-cancer agent” are used interchangeably herein. The administration of the multispecific molecule and the therapy, e.g., the cancer therapy, can be sequential (with or without overlap) or simultaneous. Administration of the multispecific molecule can be continuous or intermittent during the course of therapy (e.g., cancer therapy). Certain therapies described herein can be used to treat cancers and non-cancerous diseases. For example, PDT efficacy can be enhanced in cancerous and non-cancerous conditions (e.g., tuberculosis) using the methods and compositions described herein (reviewed in, e.g., Agostinis, P. et al. (2011) CA Cancer J. Clin. 61:250-281).

### Anti-Cancer Therapies

[0545] In other embodiments, the multispecific molecule is administered in combination with a low or small molecular weight chemotherapeutic agent. Exemplary low or small molecular weight chemotherapeutic agents include, but not limited to, 13-cis-retinoic acid (isotretinoin, ACCUTANE®), 2-CdA (2-chlorodeoxyadenosine, cladribine, LEUSTATIN™), 5-azacitidine (azacitidine, VIDAZA®), 5-fluorouracil (5-FU, fluorouracil, ADRUCIL®), 6-mercaptopurine (6-MP, mercaptopurine, PURINETHOL®), 6-TG (6-thioguanine, thioguanine, THIOGUANINE TABLOID®), abraxane (paclitaxel protein-bound), actinomycin-D (dactinomycin, COSMEGEN®), alitretinoin (PANRETIN®), all-transretinoic acid (ATRA, tretinoin, VESANOID®), altretamine (hexamethylmelamine, HMM, HEXALEN®), amethopterin (methotrexate, methotrexate sodium, MTX, TREXALL™, RHEUMATREX®), amifostine (ETHYOL®), arabinosylcytosine (Ara-C, cytarabine, CYTOSAR-U®), arsenic trioxide (TRISENOX®), asparaginase (Erwinia L-asparaginase, L-asparaginase, ELSPAR®, KIDROLASE®), BCNU (carmustine, BiCNU®), bendamustine (TREANDA®), bexarotene (TARGRETIN®), bleomycin (BLENOXANE®), busulfan (BUSULFEX®, MYLERAN®), calcium leucovorin (Citrovorum Factor, folinic acid, leucovorin), camptothecin-11 (CPT-11, irinotecan, CAMPTOSAR®), capecitabine (XELODA®), carboplatin (PARAPLATIN®), carmustine wafer (prolifeprospan 20 with carmustine implant, GLIADEL® wafer), CCI-779 (temsirolimus, TORISEL®), CCNU (lomustine, CeeNU), CDDP (cisplatin, PLATINOL®, PLATINOL-AQ®), chlorambucil (leukeran), cyclophosphamide (CYTOXAN®, NEOSAR®), dacarbazine (DIC, DTIC, imidazole carboxamide, DTIC-DOME®), daunomycin (daunorubicin, daunorubicin hydrochloride, rubidomycin hydrochloride, CERUBIDINE®), decitabine (DACOGEN®), dexrazoxane (ZINECARD®), DHAD (mitoxantrone, NOVANTRONE®), docetaxel (TAXOTERE®), doxorubicin (ADRIAMYCIN®, RUBEX®), epirubicin (ELLENCE™), estramustine (EMCYT®), etoposide (VP-16, etoposide phosphate, TOPOSAR®, VEPESID®, ETOPOPHOS®), floxuridine (FUDR®), fludarabine (FLUDARA®), fluorouracil (cream) (CARAC™, EFUDEX®, FLUOROPLEX®), gemcitabine (GEMZAR®), hydroxyurea (HYDREA®, DROXIA™, MYLOCEL™), idarubicin (IDAMYCIN®), ifosfamide (IFEX®), ixabepilone (IXEMPRA™), LCR (leurocristine, vincristine, VCR, ONCOVIN®, VINCASAR PFS®), L-PAM (L-sarcolysin, melphalan, phenylalanine mustard, ALKERAN®), mechlorethamine (mechlorethamine hydrochloride, mustine, nitrogen mustard, MUSTARGEN®), mesna (MESNEX™), mitomycin (mitomycin-C, MTC, MUTAMYCIN®), nelarabine (ARRANON®), oxaliplatin (ELOXATIN™), paclitaxel (TAXOL®, ONXAL™), pegaspargase (PEG-L-asparaginase, ONCOSPAR®), PEMETREXED (ALIMTA®), pentostatin (NIPENT®), procarbazine (MATULANE®), streptozocin (ZANOSAR®), temozolomide (TEMODAR®), teniposide (VM-26, VUMON®), TESPA (thiophosphoamide, thiotepa, TSPA, THIOPLEX®), topotecan (HYCAMTIN®), vinblastine (vinblastine sulfate, vincaleukoblastine, VLB, ALKABAN-AQ®, VELBAN®), vinorelbine (vinorelbine tartrate, NAVELBINE®), and vorinostat (ZOLINZA®).

[0546] In another embodiment, the multispecific molecule is administered in conjunction with a biologic. Biologics useful in the treatment of cancers are known in the art and a binding molecule of the invention may be administered, for example, in conjunction with such known biologics. For example, the FDA has approved the following biologics for the treatment of breast cancer: HERCEPTIN® (trastuzumab, Genentech Inc., South San Francisco, Calif.; a humanized monoclonal antibody that has anti-tumor activity in HER2-positive breast cancer); FASLODEX® (fulvestrant, AstraZeneca Pharmaceuticals, LP, Wilmington, Del.; an estrogen-receptor antagonist used to treat breast cancer); ARIMIDEX® (anastrozole, AstraZeneca Pharmaceuticals, LP; a nonsteroidal aromatase inhibitor which blocks aromatase, an enzyme needed to make estrogen); Aromasin® (exemestane, Pfizer Inc., New York, N.Y.; an irreversible, steroidal aromatase inactivator used in the treatment of breast cancer); FEMARA® (letrozole, Novartis Pharmaceuticals, East Hanover, N.J.; a nonsteroidal aromatase inhibitor approved by the FDA to treat breast cancer); and NOLVADEX® (tamoxifen, AstraZeneca Pharmaceuticals, LP; a nonsteroidal antiestrogen approved by the FDA to treat breast cancer). Other biologics with which the binding molecules of the invention may be combined include: AVASTIN® (bevacizumab, Genentech Inc.; the first FDA-approved therapy designed to inhibit angiogenesis); and ZEVALIN® (ibritumomab tiuxetan, Biogen Idec, Cambridge, Mass.; a radiolabeled monoclonal antibody currently approved for the treatment of B-cell lymphomas).

[0547] In addition, the FDA has approved the following biologics for the treatment of colorectal cancer: AVASTIN®; ERBITUX® (cetuximab, ImClone Systems Inc., New York, N.Y., and Bristol-Myers Squibb, New York, N.Y.; is a monoclonal antibody directed against the epidermal growth factor receptor (EGFR)); GLEEVEC® (imatinib mesylate; a protein kinase inhibitor); and ERGAMISOL® (levamisole hydrochloride, Janssen Pharmaceutica Products, LP, Titusville, N.J.; an immunomodulator approved by the FDA in 1990 as an adjuvant treatment in combination with 5-fluorouracil after surgical resection in patients with Dukes' Stage C colon cancer).

[0548] For the treatment of lung cancer, exemplary biologics include TARCEVA® (erlotinib HCL, OSI Pharmaceuticals Inc., Melville, N.Y.; a small molecule designed to target the human epidermal growth factor receptor 1 (HER1) pathway).

[0549] For the treatment of multiple myeloma, exemplary biologics include VELCADE® Velcade (bortezomib, Millennium Pharmaceuticals, Cambridge Mass.; a proteasome inhibitor). Additional biologics include THALIDOMID® (thalidomide, Clegene Corporation, Warren, N.J.; an immunomodulatory agent and appears to have multiple actions, including the ability to inhibit the growth and survival of myeloma cells and anti-angiogenesis).

[0550] Additional exemplary cancer therapeutic antibodies include, but are not limited to, 3F8, abagovomab, adecatumumab, afutuzumab, alacizumab pegol, alemtuzumab (CAMPATH®, MABCAMPATH®), altumomab pentetate (HYBRI-CEAKER®), anatumomab mafenatox, anrukinzumab (IMA-638), apolizumab, arcitumomab (CEA-SCAN®), bavituximab, bectumomab (LYMPHOSCAN®), belimumab (BENLYSTA®, LYMPHOSTAT-B®), besilesomab (SCINTIMUN®), bevacizumab (AVASTIN®), bivatuzumab mertansine, blinatumomab, brentuximab vedotin, cantuzumab mertansine, capromab pendetide (PROSTASCINT®), catumaxomab (REMOVAB®), CC49, cetuximab (C225, ERBITUX®), citatuzumab bogatox, cixutumumab, clivatuzumab tetraxetan, conatumumab, dacetuzumab, denosumab (PROLIA®), detumomab, ecromeximab, edrecolomab (PANOREX®), elotuzumab, epitumomab cituxetan, epratuzumab, ertumaxomab (REXOMUN®), etaracizumab, farletuzumab, figitumumab, fresolimumab, galiximab, gemtuzumab ozogamicin (MYLOTARG®), girentuximab, glembatumumab vedotin, ibritumomab (ibritumomab tiuxetan, ZEVALIN®), igovomab (INDIMACIS-125®), intetumumab, inotuzumab ozogamicin, ipilimumab, iratumumab, labetuzumab (CEA-CIDE®), lexatumumab, lintuzumab, lucatumumab, lumiliximab, mapatumumab, matuzumab, milatuzumab, minretumomab, mitumomab, nacolomab tafenatox, naptumomab estafenatox, necitumumab, nimotuzumab (THERACIM®, THERALOC®), nofetumomab merpentan (VERLUMA®), ofatumumab (ARZERRA®), olaratumab, oportuzumab monatox, oregovomab (OVAREX®), panitumumab (VECTIBIX®), pemtumomab (THERAGYN®), pertuzumab (OMNITARG®), pintumomab, pritumumab, ramucirumab, ranibizumab (LUCENTIS®), rilotumumab, rituximab (MABTHERA®, RITUXAN®), robatumumab, satumomab pendetide, sibrotuzumab, siltuximab, sontuzumab, tacatuzumab tetraxetan (AFP-CIDE®), taplitumomab paptox, tenatumomab, TGN1412, ticilimumab (tremelimumab), tigatuzumab, TNX-650, tositumomab (BEXXAR®), trastuzumab (HERCEPTIN®), tremelimumab, tucotuzumab celmoleukin, veltuzumab, volociximab, votumumab (HUMASPECT®), zalutumumab (HUMAX-EGFR®), and zanolimumab (HUMAX-CD4®).

[0551] In other embodiments, the multispecific molecule is administered in combination with a viral cancer therapeutic agent. Exemplary viral cancer therapeutic agents include, but not limited to, vaccinia virus (vvDD-CDSR), carcinoembryonic antigen-expressing measles virus, recombinant vaccinia virus (TK-deletion plus GM-CSF), Seneca Valley virus-001, Newcastle virus, coxsackie virus A21, GL-ONC1, EBNA1 C-terminal/LMP2 chimeric protein-expressing recombinant modified vaccinia Ankara vaccine, carcinoembryonic antigen-expressing measles virus, G207 oncolytic virus, modified vaccinia virus Ankara vaccine expressing p53, OncoVEX GM-CSF modified herpes-simplex 1 virus, fowlpox virus vaccine vector, recombinant vaccinia prostate-specific antigen vaccine, human papillomavirus 16/18 L1 virus-like particle/ASO4 vaccine, MVA-EBNA1/LMP2 Inj. vaccine, quadrivalent HPV vaccine, quadrivalent human papillomavirus (types 6, 11, 16, 18) recombinant vaccine (GARDASIL®), recombinant fowlpox-CEA(6D)/TRICOM vaccine; recombinant vaccinia-CEA(6D)-TRICOM vaccine, recombinant modified vaccinia Ankara-5T4 vaccine, recombinant fowlpox-TRICOM vaccine, oncolytic herpes virus NV1020, HPV L1 VLP vaccine V504, human papillomavirus bivalent (types 16 and 18) vaccine (CERVARIX®), herpes simplex virus HF10, Ad5CMV-p53 gene, recombinant vaccinia DF3/MUC1 vaccine, recombinant vaccinia-MUC-1 vaccine, recombinant vaccinia-TRICOM vaccine, ALVAC MART-1 vaccine, replication-defective herpes simplex virus type I (HSV-1) vector expressing human Preproenkephalin (NP2), wild-type reovirus, reovirus type 3 Dearing (REOLYSIN®), oncolytic virus HSV1716, recombinant modified vaccinia Ankara (MVA)-based vaccine encoding Epstein-Barr virus target antigens, recombinant fowlpox-prostate specific antigen vaccine, recombinant vaccinia prostate-specific antigen vaccine, recombinant vaccinia-B7.1 vaccine, rAd-p53 gene, Ad5-delta24RGD, HPV vaccine 580299, JX-594 (thymidine kinase-deleted vaccinia virus plus GM-CSF), HPV-16/18 L1/AS04, fowlpox virus vaccine vector, vaccinia-tyrosinase vaccine, MEDI-517 HPV-16/18 VLP AS04 vaccine, adenoviral vector containing the thymidine kinase of herpes simplex virus TK99UN, HspE7, FP253/Fludarabine, ALVAC(2) melanoma multi-antigen therapeutic vaccine, ALVAC-hB7.1, canarypox-hIL-12 melanoma vaccine, Ad-REIC/Dkk-3, rAd-IFN SCH 721015, TIL-Ad-INFg, Ad-ISF35, and coxsackievirus A21 (CVA21, CAVATAK®).

[0552] In other embodiments, the multispecific molecule is administered in combination with a nanopharmaceutical. Exemplary cancer nanopharmaceuticals include, but not limited to, ABRAXANE® (paclitaxel bound albumin nanoparticles), CRLX101 (CPT conjugated to a linear cyclodextrin-based polymer), CRLX288 (conjugating docetaxel to the biodegradable polymer poly (lactic-co-glycolic acid)), cytarabine liposomal (liposomal Ara-C, DEPOCYT™) daunorubicin liposomal (DAUNOXOME®), doxorubicin liposomal (DOXIL®, CAELYX®), encapsulated-daunorubicin citrate liposome (DAUNOXOME®), and PEG anti-VEGF aptamer (MACUGEN®).

[0553] In some embodiments, the multispecific molecule is administered in combination with paclitaxel or a paclitaxel formulation, e.g., TAXOL®, protein-bound paclitaxel (e.g., ABRAXANE®). Exemplary paclitaxel formulations include, but are not limited to, nanoparticle albumin-bound paclitaxel (ABRAXANE®, marketed by Abraxis Bioscience), docosahexaenoic acid bound-paclitaxel (DHA-paclitaxel, Taxoprexin, marketed by Protarga), polyglutamate bound-paclitaxel (PG-paclitaxel, paclitaxel poliglumex, CT-2103, XYOTAX, marketed by Cell Therapeutic), the tumor-activated prodrug (TAP), ANG105 (Angiopep-2 bound to three molecules of paclitaxel, marketed by ImmunoGen), paclitaxel-EC-1 (paclitaxel bound to the erbB2-recognizing peptide EC-1; see Li et al., Biopolymers (2007) 87:225-230), and glucose-conjugated paclitaxel (e.g., 2′-paclitaxel methyl 2-glucopyranosyl succinate, see Liu et al., Bioorganic & Medicinal Chemistry Letters (2007) 17:617-620).

[0554] Exemplary RNAi and antisense RNA agents for treating cancer include, but not limited to, CALAA-01, siG12D LODER (Local Drug EluteR), and ALN-VSP02.

[0555] Other cancer therapeutic agents include, but not limited to, cytokines (e.g., aldesleukin (IL-2, Interleukin-2, PROLEUKIN®), alpha Interferon (IFN-alpha, Interferon alfa, INTRON® A (Interferon alfa-2b), ROFERON-A® (Interferon alfa-2a)), Epoetin alfa (PROCRIT®), filgrastim (G-CSF, Granulocyte—Colony Stimulating Factor, NEUPOGEN®), GM-CSF (Granulocyte Macrophage Colony Stimulating Factor, sargramostim, LEUKINE™), IL-11 (Interleukin-11, oprelvekin, NEUMEGA®), Interferon alfa-2b (PEG conjugate) (PEG interferon, PEG-INTRON™), and pegfilgrastim (NEULASTA™)), hormone therapy agents (e.g., aminoglutethimide (CYTADREN®), anastrozole (ARIMIDEX®), bicalutamide (CASODEX®), exemestane (AROMASIN®), fluoxymesterone (HALOTESTIN®), flutamide (EULEXIN®), fulvestrant (FASLODEX®), goserelin (ZOLADEX®), letrozole (FEMARA®), leuprolide (ELIGARD™, LUPRON®, LUPRON DEPOT®, VIADUR™), megestrol (megestrol acetate, MEGACE®), nilutamide (ANANDRON®, NILANDRON®), octreotide (octreotide acetate, SANDOSTATIN®, SANDOSTATIN LAR®), raloxifene (EVISTA®), romiplostim (NPLATE®), tamoxifen (NOVALDEX®), and toremifene (FARESTON®)), phospholipase A2 inhibitors (e.g., anagrelide (AGRYLIN®)), biologic response modifiers (e.g., BCG (THERACYS®, TICE®), and Darbepoetin alfa (ARANESP®)), target therapy agents (e.g., bortezomib (VELCADE®), dasatinib (SPRYCEL™), denileukin diftitox (ONTAK®), erlotinib (TARCEVA®), everolimus (AFINITOR®), gefitinib (TRESSA®), imatinib mesylate (STI-571, GLEEVEC™), lapatinib (TYKERB®), sorafenib (NEXAVAR®), and SU11248 (sunitinib, SUTENT®)), immunomodulatory and antiangiogenic agents (e.g., CC-5013 (lenalidomide, REVLIMID®), and thalidomide (THALOMID®)), glucocorticosteroids (e.g., cortisone (hydrocortisone, hydrocortisone sodium phosphate, hydrocortisone sodium succinate, ALA-CORT®, HYDROCORT ACETATE®, hydrocortone phosphate LANACORT®, SOLU-CORTEF®), decadron (dexamethasone, dexamethasone acetate, dexamethasone sodium phosphate, DEXASONE®, DIODEX®, HEXADROL®, MAXIDEX®), methylprednisolone (6-methylprednisolone, methylprednisolone acetate, methylprednisolone sodium succinate, DURALONE®, MEDRALONE®, MEDROL®, M-PREDNISOL®, SOLU-MEDROL®), prednisolone (DELTA-CORTEF®, ORAPRED®, PEDIAPRED®, PRELONE®), and prednisone (DELTASONE®, LIQUID PRED®, METICORTEN®, ORASONE®)), and bisphosphonates (e.g., pamidronate (AREDIA®), and zoledronic acid (ZOMETA®))

[0556] In some embodiments, the multispecific molecule is used in combination with a tyrosine kinase inhibitor (e.g., a receptor tyrosine kinase (RTK) inhibitor). Exemplary tyrosine kinase inhibitor include, but are not limited to, an epidermal growth factor (EGF) pathway inhibitor (e.g., an epidermal growth factor receptor (EGFR) inhibitor), a vascular endothelial growth factor (VEGF) pathway inhibitor (e.g., an antibody against VEGF, a VEGF trap, a vascular endothelial growth factor receptor (VEGFR) inhibitor (e.g., a VEGFR-1 inhibitor, a VEGFR-2 inhibitor, a VEGFR-3 inhibitor)), a platelet derived growth factor (PDGF) pathway inhibitor (e.g., a platelet derived growth factor receptor (PDGFR) inhibitor (e.g., a PDGFR-8 inhibitor)), a RAF-1 inhibitor, a KIT inhibitor and a RET inhibitor. In some embodiments, the anti-cancer agent used in combination with the multispecific molecule is selected from the group consisting of: axitinib (AG013736), bosutinib (SKI-606), cediranib (RECENTIN™, AZD2171), dasatinib (SPRYCEL®, BMS-354825), erlotinib (TARCEVA®), gefitinib (IRESSA®), imatinib (Gleevec®, CGP57148B, STI-571), lapatinib (TYKERB®, TYVERB®), lestaurtinib (CEP-701), neratinib (HKI-272), nilotinib (TASIGNA®), semaxanib (semaxinib, SU5416), sunitinib (SUTENT®, SU11248), toceranib (PALLADIA®), vandetanib (ZACTIMA®, ZD6474), vatalanib (PTK787, PTK/ZK), trastuzumab (HERCEPTIN®), bevacizumab (AVASTIN®), rituximab (RITUXAN®), cetuximab (ERBITUX®), panitumumab (VECTIBIX®), ranibizumab (Lucentis®), nilotinib (TASIGNA®), sorafenib (NEXAVAR®), alemtuzumab (CAMPATH®), gemtuzumab ozogamicin (MYLOTARG®), ENMD-2076, PCI-32765, AC220, dovitinib lactate (TK1258, CHIR-258), BIBW 2992 (TOVOK™), SGX523, PF-04217903, PF-02341066, PF-299804, BMS-777607, ABT-869, MP470, BIBF 1120 (VARGATEF®), AP24534, JNJ-26483327, MGCD265, DCC-2036, BMS-690154, CEP-11981, tivozanib (AV-951), OSI-930, MM-121, XL-184, XL-647, XL228, AEE788, AG-490, AST-6, BMS-599626, CUDC-101, PD153035, pelitinib (EKB-569), vandetanib (zactima), WZ3146, WZ4002, WZ8040, ABT-869 (linifanib), AEE788, AP24534 (ponatinib), AV-951(tivozanib), axitinib, BAY 73-4506 (regorafenib), brivanib alaninate (BMS-582664), brivanib (BMS-540215), cediranib (AZD2171), CHIR-258 (dovitinib), CP 673451, CYC116, E7080, Ki8751, masitinib (AB1010), MGCD-265, motesanib diphosphate (AMG-706), MP-470, OSI-930, Pazopanib Hydrochloride, PD173074, nSorafenib Tosylate(Bay 43-9006), SU 5402, TSU-68(SU6668), vatalanib, XL880 (GSK1363089, EXEL-2880). Selected tyrosine kinase inhibitors are chosen from sunitinib, erlotinib, gefitinib, or sorafenib. In one embodiment, the tyrosine kinase inhibitor is sunitinib.

[0557] In one embodiment, the multispecific molecule is administered in combination with one of more of: an anti-angiogenic agent, or a vascular targeting agent or a vascular disrupting agent. Exemplary anti-angiogenic agents include, but are not limited to, VEGF inhibitors (e.g., anti-VEGF antibodies (e.g., bevacizumab); VEGF receptor inhibitors (e.g., itraconazole); inhibitors of cell proliferatin and/or migration of endothelial cells (e.g., carboxyamidotriazole, TNP-470); inhibitors of angiogenesis stimulators (e.g., suramin), among others. A vascular-targeting agent (VTA) or vascular disrupting agent (VDA) is designed to damage the vasculature (blood vessels) of cancer tumors causing central necrosis (reviewed in, e.g., Thorpe, P. E. (2004) Clin. Cancer Res. Vol. 10:415-427). VTAs can be small-molecule. Exemplary small-molecule VTAs include, but are not limited to, microtubule destabilizing drugs (e.g., combretastatin A-4 disodium phosphate (CA4P), ZD6126, AVE8062, Oxi 4503); and vadimezan (ASA404).

### Immune Checkpoint Inhibitors

[0558] In other embodiments, methods described herein comprise use of an immune checkpoint inhibitor in combination with the multispecific molecule. The methods can be used in a therapeutic protocol in vivo.

[0559] In embodiments, an immune checkpoint inhibitor inhibits a checkpoint molecule. Exemplary checkpoint molecules include but are not limited to CTLA4, PD1, PD-L1, PD-L2, TIM3, LAG3, CD160, 2B4, CD80, CD86, B7-H3 (CD276), B7-H4 (VTCN1), HVEM (TNFRSFi4 or CD270), BTLA, KIR, MHC class I, MHC class II, GAL9, VISTA, BTLA, TIGIT, LAIR1, and A2aR. See, e.g., Pardoll. Nat. Rev. Cancer 12.4(2012):252-64, incorporated herein by reference.

[0560] In embodiments, the immune checkpoint inhibitor is a PD-1 inhibitor, e.g., an anti-PD-1 antibody such as Nivolumab, Pembrolizumab or Pidilizumab. Nivolumab (also called MDX-1106, MDX-1106-04, ONO-4538, or BMS-936558) is a fully human IgG4 monoclonal antibody that specifically inhibits PD1. See, e.g., U.S. Pat. No. 8,008,449 and WO2006/121168. Pembrolizumab (also called Lambrolizumab, MK-3475, MK03475, SCH-900475 or KEYTRUDA®; Merck) is a humanized IgG4 monoclonal antibody that binds to PD-1. See, e.g., Hamid, O. et al. (2013) New England Journal of Medicine 369 (2): 134-44, U.S. Pat. No. 8,354,509 and WO2009/114335. Pidilizumab (also called CT-011 or Cure Tech) is a humanized IgGik monoclonal antibody that binds to PD1. See, e.g., WO2009/101611. In one embodiment, the inhibitor of PD-1 is an antibody molecule having a sequence substantially identical or similar thereto, e.g., a sequence at least 85%, 90%, 95% identical or higher to the sequence of Nivolumab, Pembrolizumab or Pidilizumab. Additional anti-PD1 antibodies, e.g., AMP 514 (Amplimmune), are described, e.g., in U.S. Pat. No. 8,609,089, US 2010028330, and/or US 20120114649.

[0561] In some embodiments, the PD-1 inhibitor is an immunoadhesin, e.g., an immunoadhesin comprising an extracellular/PD-1 binding portion of a PD-1 ligand (e.g., PD-L1 or PD-L2) that is fused to a constant region (e.g., an Fc region of a heavy chain). In embodiments, the PD-1 inhibitor is AMP-224 (B7-DCIg, e.g., described in WO2011/066342 and WO2010/027827), a PD-L2 Fc fusion soluble receptor that blocks the interaction between B7-H1 and PD-1.

[0562] In embodiments, the immune checkpoint inhibitor is a PD-L1 inhibitor, e.g., an antibody molecule. In some embodiments, the PD-L1 inhibitor is YW243.55.S70, MPDL3280A, MEDI-4736, MSB-0010718C, or MDX-1105. In some embodiments, the anti-PD-L1 antibody is MSB0010718C (also called A09-246-2; Merck Serono), which is a monoclonal antibody that binds to PD-L1. Exemplary humanized anti-PD-L1 antibodies are described, e.g., in WO2013/079174. In one embodiment, the PD-L1 inhibitor is an anti-PD-L1 antibody, e.g., YW243.55.S70. The YW243.55.S70 antibody is described, e.g., in WO 2010/077634. In one embodiment, the PD-L1 inhibitor is MDX-1105 (also called BMS-936559), which is described, e.g., in WO2007/005874. In one embodiment, the PD-L1 inhibitor is MDPL3280A (Genentech/Roche), which is a human Fc-optimized IgG1 monoclonal antibody against PD-L1. See, e.g., U.S. Pat. No. 7,943,743 and U.S Publication No.: 20120039906. In one embodiment, the inhibitor of PD-L1 is an antibody molecule having a sequence substantially identical or similar thereto, e.g., a sequence at least 85%, 90%, 95% identical or higher to the sequence of YW243.55.S70, MPDL3280A, MEDI-4736, MSB-0010718C, or MDX-1105.

[0563] In embodiments, the immune checkpoint inhibitor is a PD-L2 inhibitor, e.g., AMP-224 (which is a PD-L2 Fc fusion soluble receptor that blocks the interaction between PD1 and B7-H1. See, e.g., WO2010/027827 and WO2011/066342.

[0564] In one embodiment, the immune checkpoint inhibitor is a LAG-3 inhibitor, e.g., an anti LAG-3 antibody molecule. In embodiments, the anti-LAG-3 antibody is BMS-986016 (also called BMS986016; Bristol-Myers Squibb). BMS-986016 and other humanized anti-LAG-3 antibodies are described, e.g., in US 2011/0150892, WO2010/019570, and WO2014/008218.

[0565] In embodiments, the immune checkpoint inhibitor is a TIM-3 inhibitor, e.g., anti-TIM3 antibody molecule, e.g., described in U.S. Pat. No. 8,552,156, WO 2011/155607, EP 2581113 and U.S Publication No.: 2014/044728.

[0566] In embodiments, the immune checkpoint inhibitor is a CTLA-4 inhibitor, e.g., anti-CTLA-4 antibody molecule. Exemplary anti-CTLA4 antibodies include Tremelimumab (IgG2 monoclonal antibody from Pfizer, formerly known as ticilimumab, CP-675,206); and Ipilimumab (also called MDX-010, CAS No. 477202-00-9). Other exemplary anti-CTLA-4 antibodies are described, e.g., in U.S. Pat. No. 5,811,097.

### EXAMPLES

[0567] The following examples are intended to be illustrative, and are not meant in any way to be limiting.

### Example 1. Generation of Multiple αCCR2/αCSF1R Bispecific Antibody Molecules

### 1. Construction of the Plasmids.

[0568] The DNA encoding the protein sequences was optimized for expression in Cricetulus griseus, synthesized, and cloned into the pcDNA3.4-TOPO (Life Technologies A14697) using Gateway cloning. All constructs contained an Ig Kappa leader sequence (ATGGAAACCGACACACTGCTGCTGTGGGTGCTGCTCTTGTGGGTGCCAGGATCTAC AGGA (SEQ ID NO: 115), METDTLLLWVLLLWVPGSTG (SEQ ID NO: 116)). The nucleic acid sequences used are shown in Table 1.

TABLE 1
Exemplary nucleic acid sequences of antibodies

| SEQ ID | | |
|---|---|---|
| NO | Description | Nucleic Acid Sequence |
| SEQ ID | αCCR2 | CAGGTCCAGCTGCAAGAGTCTGGCCCTGGACTGGTTCAGCCCTCTCAGA |
| NO: 1 | MC12 VH | CCCTGTCTCTGACCTGTACCGTGTCCGGCTTCTCCCTGACCGACTTCTCTG |
| | | TGCACTGGGTCCGACAGCCTCCAGGCAAAGGACTGGAATGGATGGGCAG |
| | | AATCAGATCCGAGGGCAACACCGACTACAACAGCGCCCTGAAGTCCCGG |
| | | CTGTCTATCAGCAGAGACACCTCCAAGAGCCAGGTGTTCCTGAAGATGA |
| | | ACTCCCTGCAGACCGAGGACACCGCCATCTATTTCTGCACCAGAGGCGA |
| | | CATCCTCGGCTTCGGCTATTGGGGACAGGGCGTGATGGTCACCGTTAGCT |
| | | CT |
| SEQ ID | αCCR2 | GACATCGTGATGACCCAGTCTCCACTGTCCGTGTCTGTGACCCCTGGCGA |
| NO: 2 | MC12 VL | GTCTGCCTCCATCTCCTGCAGATCCTCCAAGAGCCTGCTGCACTTCAAGG |
| | | GCATCACCTTCGTGTACTGGTATCTGCAGAAGCCCGGCCAGTCTCCTCAG |
| | | CTGCTGATCTTCAGAATGTCCAGCCTGGCCTCTGGCGTGCCCGATAGATT |
| | | TTCTGGCTCCGGCTCCGAGACAGACTTCACCCTGAAGATCTCCAGAGTG |
| | | GAAGCCGAGGACGTGGGCACCTACTATTGTGGCCAGCTGCTGGAAAACC |
| | | CCTACACCTTTGGCGCTGGCACCAAGCTGGAACTGAAG |
| SEQ ID | R2b CH1 | GCTCAGACCACCGCTCCTAGCGTGTACCCTTTGGCTCCTGGCTGTGGCGA |
| NO: 3 | | CACCACCTCTTCTACAGTGACCCTGGGCTGTCTGGTCAAGGGCTACTTTC |
| | | CTGAGCCTGTGACCGTGACCTGGAACTCTGGTGCCCTGTCCTCCGACGTG |
| | | CACACCTTTCCAGCTGTGCTGCAGTCCGGCCTGTACACCCTGACATCCTC |
| | | CGTGACCTCTTCCACCTGGCCTAGCCAGACCGTGACATGCAATGTGGCTC |
| | | ACCCTGCCTCCAGCACCAAGGTGGACAAGAAGGTGGAACGGCGG |
| SEQ ID | R2b CL | AGAGCTGACGCTGCCCCTACCGTGTCTATCTTCCCTCCATCCATGGAACA |
| NO: 4 | | GCTGACCTCTGGCGGAGCTACCGTCGTGTGCTTCGTGAACAACTTCTACC |
| | | CTCGGGACATCTCCGTGAAGTGGAAGATCGACGGCTCTGAGCAGCGAGA |
| | | TGGCGTGCTGGATTCTGTGACCGACCAGGACTCCAAGGACAGCACCTAC |
| | | TCCATGTCTAGCACCCTGAGCCTGACCAAGGTGGAATACGAGCGGCACA |
| | | ACCTGTATACCTGCGAGGTGGTGCACAAGACCTCCAGCTCTCCCGTGGTC |
| | | AAGTCCTTCAACCGGAACGAGTGC |
| SEQ ID | αmCSF1R | CAGGTCCAGTTGCAGCAGTCTGGCGCTGAGCTGGTCAAGCCTGGATCCT |
| NO: 5 | VH | CCGTGAAGATCTCCTGCAAGGCCTCCGGCTACACCTTCACCTCCAACTTC |
| | | ATGCACTGGATCAAGCAGCAGCCCGGCAACGGCCTGGAATGGATCGGAT |
| | | GGATCTATCCTGGCGACGGCGACACCGAGTACAACCAGAAGTTCAACGG |
| | | CAAGGCTACCCTGACCGCCGACAAGTCCTCTTCCACCGCTTACATGCAGC |
| | | TGTCCAGCCTGACCTCTGAGGACTCCGCCGTGTACTTCTGCGCCGTGAAT |
| | | TATGGCGGCTACGTGCTGGATGCTTGGGGCCAAGGCGCTTCTGTGACAG |
| | | TGTCCTCT |
| SEQ ID | R2a CH1 | GCCGAGACAACCGCTCCTAGCGTTTACCCTCTGGCTCCTGGCACAGCCCT |
| NO: 6 | | GAAGTCCAACTCTATGGTCACCCTGGGCTGCCTGGTCAAGGGCTACTTTC |
| | | CTGAGCCTGTGACCGTGACCTGGAACTCTGGTGCTCTGTCTAGCGGCGTG |
| | | CACACCTTTCCAGCTGTGCTGCAGAGCGGCCTGTACACCCTGACATCTAG |
| | | CGTGACCGTGCCTTCCAGCACCTGGTCTAGTCAGGCTGTGACCTGCAACG |
| | | TGGCCCATCCTGCCTCTTCTACCAAGGTGGACAAGAAAATCGTGCCCAG |
| | | AGAGTGCAAC |
| SEQ ID | αmCSF1R | GAGATCGTGCTGACCCAGTCTCCTACCACCATGGCTGCTAGCCCTGGCG |
| NO: 7 | VL | AGAAAGTGACAATTACCTGCCGGGCCTCCTCCTCCACCAACTACATGTCC |
| | | TGGTATCAGCAGAAGTCCGGCGCCTCTCCTAAGCCTTGGATCTACGAGA |
| | | CATCCAAGCTGGCCTCTGGCGTGCCCGATAGATTTTCCGGCTCTGGCTCC |
| | | GGCACCTCCTACAGCTTCACCATCTCCAGCATGGAAACAGAGGACGCCG |
| | | CCACCTACTACTGCCACCAGTGGTCATCTACCCCTCTGACCTTTGGCAGC |
| | | GGCACCAAGCTGGAAATCAAG |
| SEQ ID | R2a CL | AGAGCTGACGCCGCTCCTACCGTGTCTATCTTCCCTCCATCCATGGAACA |
| NO: 8 | | GCTGACCTCCGGCGGAGCTACCGTCGTGTGTTTCGTGAACAACTTCTACC |
| | | CTCGGGACATCTCCGTGAAGTGGAAGATCGACGGCTCTGAGCAGCGAGA |
| | | TGGCGTGCTGGATTCTGTGACCGACCAGGACTCCAAGGACAGCACCTAC |
| | | TCCATGTCTAGCACCCTGAGCCTGACCAAGGTGGAATACGAGCGGCACA |
| | | ACCTGTATACCTGCGAGGTGGTGCACAAGACCTCCAGCTCTCCCGTGGTC |
| | | AAGTCCTTCAACCGGAACGAGTGC |
| SEQ ID | mFc Knob | ACCATTAAGCCTTGTCCTCCATGCAAGTGCCCCGCTCCTAATCTGCTCGG |
| NO: 9 | | AGGCCCTTCCGTGTTCATCTTTCCACCTAAGATCAAGGACGTGCTGATGA |
| | | TCTCCCTGTCTCCTATCGTGACCTGCGTGGTGGTGGACGTGTCCGAGGAT |
| | | GATCCTGACGTGCAGATCAGTTGGTTCGTGAACAACGTGGAAGTGCACA |
| | | CCGCTCAGACCCAGACACACAGAGAGGACTACAACTCTACCCTGAGAGT |
| | | GGTGTCTGCCCTGCCTATCCAGCATCAGGACTGGATGTCCGGCAAAGAA |
| | | TTCAAGTGCAAAGTGAACAACAAGGACCTGCCTGCTCCAATCGAGCGGA |
| | | CCATCTCTAAGCCTAAGGGCTCTGTCAGGGCCCCTCAGGTGTACGTTCTG |
| | | CCTCCTTGCGAGGAAGAGATGACCAAGAAACAAGTGACACTGTGGTGCA |
| | | TGGTCACAGACTTCATGCCCGAGGACATCTACGTGGAATGGACCAACAA |
| | | CGGCAAGACCGAGCTGAACTACAAGAACACCGAGCCTGTGCTGGACTCC |
| | | GACGGCTCCTACTTCATGTACTCCAAGCTGCGCGTCGAGAAGAAGAACT |
| | | GGGTCGAGAGAAACTCCTACTCCTGCTCCGTGGTGCACGAGGGCCTGCA |
| | | CAATCACCACACCACCAAGTCCTTCTCTCGGACCCCTGGCAAG |
| SEQ ID | mFc Hole | ACCATCAAGCCCTGTCCTCCATGCAAGTGCCCCGCTCCTAATCTGCTCGG |
| NO: 10 | | AGGCCCTTCCGTGTTCATCTTCCCACCTAAGATCAAGGACGTGCTGATGA |
| | | TCTCCCTGTCTCCTATCGTGACCTGCGTGGTGGTGGACGTGTCCGAGGAT |
| | | GATCCTGACGTGCAGATCAGTTGGTTCGTGAACAACGTGGAAGTGCACA |
| | | CCGCTCAGACCCAGACACACAGAGAGGACTACAACAGCACCCTGAGAG |
| | | TGGTGTCTGCCCTGCCAATCCAGCACCAGGATTGGATGTCCGGCAAAGA |
| | | ATTCAAGTGCAAAGTGAACAACAAGGACCTGCCTGCTCCAATCGAGCGG |
| | | ACCATCTCTAAGCCTAAGGGCTCTGTGCGGGCTCCCCAAGTTTGTGTTCT |
| | | GCCTCCACCTGAGGAAGAGATGACCAAGAAACAAGTGACCCTGTCTTGT |
| | | GCCGTGACCGACTTCATGCCCGAGGACATCTACGTGGAATGGACCAACA |
| | | ATGGCAAGACCGAGCTGAACTACAAGAACACCGAGCCTGTGCTGGACTC |
| | | CGACGGCTCCTACTTCATGGTGTCTAAGCTGCGCGTCGAGAAGAAGAAC |
| | | TGGGTCGAGAGAAACTCCTACTCCTGCTCCGTGGTGCACGAGGGCCTGC |
| | | ACAATCACCACACCACCAAGTCCTTCTCTCGGACCCCTGGCAAG |
| SEQ ID | αhCCR2 | GAGGTGCAGCTGGTTGAATCTGGCGGAGGACTGGTTAAGCCTGGCGGCT |
| NO: 11 | plozalizumab | CTCTGAGACTGTCTTGTGCCGCTTCTGGCTTCACCTTCTCCGCCTACGCCA |
| | VH | TGAACTGGGTCCGACAGGCTCCTGGCAAAGGCCTGGAATGGGTCGGAAG |
| | | AATCCGGACCAAGAACAACAACTACGCCACCTACTACGCCGACTCCGTG |
| | | AAGGACCGGTTCACCATCTCTCGGGACGACTCCAAGAACACCCTGTACC |
| | | TGCAGATGAACTCCCTGAAAACCGAGGACACCGCCGTGTACTACTGCAC |
| | | CACCTTCTACGGCAATGGCGTGTGGGGACAGGGCACACTGGTTACCGTT |
| | | TCTTCCGCCTCCACCAAGGGACCCTCTGTGTTTCCTCTGGCTCCCTCCAG |
| | | CAAGTCTACCTCTGGTGGAACAGCTGCCCTGGGCTGCCTGGTCAAGGAT |
| | | TACTTTCCTGAGCCTGTGACCGTGTCCTGG |
| SEQ ID | hCH1 | GCTTCTACCAAGGGACCCAGCGTGTTCCCTCTGGCTCCTTCCAGCAAGTC |
| NO: 12 | | TACCTCTGGCGGAACAGCTGCTCTGGGCTGCCTGGTCAAGGACTACTTTC |
| | | CTGAGCCTGTGACCGTGTCTTGGAACTCTGGCGCTCTGACATCCGGCGTG |
| | | CACACATTTCCAGCTGTGCTGCAGTCCTCCGGCCTGTACTCTCTGTCCTCT |
| | | GTCGTGACCGTGCCTTCCAGCTCTCTGGGAACCCAGACCTACATCTGCAA |
| | | TGTGAACCACAAGCCTTCCAACACCAAGGTGGACAAGAGAGTGGAACCC |
| | | AAGTCCTGC |
| SEQ ID | hFc Knob | GATAAGACCCACACATGTCCTCCATGCCCTGCCCCTGAGCTGCTGGGCG |
| NO: 13 | | GACCTTCCGTGTTCCTGTTCCCTCCAAAGCCCAAGGACACCCTGATGATC |
| | | AGCCGGACCCCTGAAGTGACCTGCGTGGTGGTGGATGTGTCCCACGAGG |
| | | ATCCCGAAGTGAAGTTCAATTGGTACGTGGACGGCGTGGAAGTGCACAA |
| | | CGCCAAGACCAAGCCCAGAGAGGAACAGTACAACAGCACCTACCGGGT |
| | | GGTGTCCGTGCTGACCGTGCTGCATCAGGACTGGCTGAACGGCAAAGAG |
| | | TACAAGTGCAAGGTGTCCAACAAGGCCCTGCCTGCCCCTATCGAGAAAA |
| | | CCATCAGCAAGGCCAAGGGCCAGCCCCGCGAACCTCAGGTGTACACACT |
| | | GCCTCCCTGCCGGGAAGAGATGACCAAGAACCAGGTGTCCCTGTGGTGC |
| | | CTGGTCAAGGGCTTCTACCCCTCCGATATCGCCGTGGAATGGGAGAGCA |
| | | ACGGCCAGCCCGAGAACAACTACAAGACCACCCCTCCCGTGCTGGACAG |
| | | CGACGGCAGCTTCTTCCTGTACTCCAAACTGACCGTGGACAAGAGCCGG |
| | | TGGCAGCAGGGCAATGTGTTCAGCTGTAGCGTGATGCACGAGGCCCTGC |
| | | ACAACCACTACACCCAGAAGTCCCTGAGCCTGTCTCCTGGCAAA |
| SEQ ID | αhCCR2 | GACGTGGTCATGACACAGAGCCCTCTGTCTCTGCCCGTGACATTGGGAC |
| NO: 14 | plozalizumab | AGCCTGCCTCCATCTCCTGCAAGTCCTCTCAGTCCCTGCTGGACTCTGAC |
| | VL | GGCAAGACCTTCCTGAACTGGTTCCAGCAGCGGCCTGGCCAGTCTCCTA |
| | | GAAGGCTGATCTACCTGGTGTCCAAGCTGGATTCTGGCGTGCCCGACAG |
| | | ATTCTCCGGCTCTGGCTCTGGCACCGACTTCACCCTGAAGATCTCCAGAG |
| | | TGGAAGCCGAGGACGTGGGCGTGTACTACTGTTGGCAGGGCACCCACTT |
| | | TCCATACACCTTCGGCCAGGGCACCAGACTGGAAATCAAG |
| SEQ ID | hCL (kappa) | AGAACAGTGGCCGCTCCTTCCGTGTTCATCTTCCCACCCTCCGACGAGCA |
| NO: 15 | | GCTGAAGTCCGGCACCGCTTCTGTCGTGTGCCTGCTCAACAACTTCTACC |
| | | CTCGGGAAGCCAAGGTGCAGTGGAAGGTGGACAACGCCCTGCAGTCCG |
| | | GCAACTCCCAGGAATCCGTCACCGAGCAGGACTCCAAGGACAGCACCTA |
| | | CTCCCTGTCCTCCACCCTGACCCTGTCCAAGGCCGACTACGAGAAGCAC |
| | | AAGGTGTACGCCTGCGAAGTGACCCACCAGGGCCTGAGCAGCCCCGTGA |
| | | CCAAGTCCTTCAACCGGGGCGAGTGC |
| SEQ ID | αhCCR2 D1 | GAAGTGCAGCTGGTTCAGTCTGGCGCCGAAGTGAAGAAACCTGGCGCCT |
| NO: 16 | VH | CTGTGAAGGTGTCCTGCAAGGCTTCTGGCTACACCTTTACCGGCTACCAC |
| | | ATGCACTGGGTCCGACAGGCTCCAGGACAAGGCTTGGAATGGATGGGCT |
| | | GGATCAACCCCAACTCCGGCGTGACCAAATACGCCCAGAAATTCCAGGG |
| | | CAGAGTGACCATGACCAGAGACACCTCCATCAACACCGCCTACATGGAA |
| | | CTGTCCCGGCTGAGATTCGACGACACCGACGTGTACTACTGTGCCACCG |
| | | GCGGCTTTGGCTATTGGGGAGAGGGAACACTGGTCACCGTGTCCTCC |
| SEQ ID | αhCCR2 D1 | CTGCCCGTGTTGACCCAGCCTCCTAGCGTTTCCAAGGGCCTGAGACAGA |
| NO: 17 | VL | CCGCCACACTGACCTGTACCGGCAACTCTAACAACGTGGGCAATCAGGG |
| | | CGCTGCCTGGTTGCAGCAGCATCAGGGACAGCCTCCAAAGCTGCTGTCC |
| | | TACCGGAACCACAACAGACCTAGCGGCGTGTCCGAGCGGTTCAGCCCTT |
| | | CTAGATCTGGCGACACCTCCAGCCTGACCATCACTGGACTGCAGCCTGA |
| | | GGACGAGGCCGACTACTATTGTCTGGCCTGGGACAGCTCCCTGCGGGCC |
| | | TTTGTTTTTGGCACCGGCACCAAGCTGACCGTGCTG |
| SEQ ID | hCL | GGACAACCTAAGGCCAATCCTACCGTGACACTGTTCCCTCCATCCTCCGA |
| NO: 18 | (lambda) | GGAACTGCAGGCCAACAAGGCTACCCTCGTGTGCCTGATCTCCGACTTTT |
| | | ACCCTGGCGCTGTGACCGTGGCCTGGAAGGCTGATGGATCTCCTGTGAA |
| | | GGCTGGCGTGGAAACCACCAAGCCTTCCAAGCAGTCCAACAACAAATAC |
| | | GCCGCCTCCTCCTACCTGTCTCTGACCCCTGAACAGTGGAAGTCCCACCG |
| | | GTCCTACAGCTGCCAAGTGACCCATGAGGGCTCCACCGTGGAAAAGACC |
| | | GTGGCTCCTACCGAGTGCTCC |
| SEQ ID | αhCCR2 | CAGGTGCAGCTGGTTCAGTCTGGCGCCGAAGTGAAGAAACCTGGCGCCT |
| NO: 19 | 42G7 VH | CTGTGAAGGTGTCCTGCAAGGCTTCCGGCTACACCTTCTCCAGCTACTAC |
| | | ATGCACTGGGTCCGACAGGCCCCTGGACAAGGATTGGAGTGGATGGGCA |
| | | TCATCAACCCCTCTGGCGGCAACACCTCTTACGCCCAGAAATTCCAGGG |
| | | CAGAGTGACCATGACCAGAGACACCTCCACCAGCACCGTGTACATGGAA |
| | | CTGTCCAGCCTGAGATCCGAGGACACCGCCGTGTACTACTGTGCCAGAG |
| | | GCGGATACCAGCTGCCTCACGGTAGAGCCAGAGCCTTCGATATGTGGGG |
| | | CCAGGGCACAATGGTCACCGTGTCCTCT |
| SEQ ID | αhCCR2 | GCCATCAGAATGACCCAGTCTCCACTGAGCCTGCCTGTGACATTGGGCC |
| NO: 20 | 42G7 VL | AGCCTGCCTCTATCTCCTGCACCTCCTCTCAGTCTCTGGTGTACAGAGAT |
| | | GGCACCACCTACCTGAACTGGTTCCAGCAGAGGCCTGGCCAGTCTCCTA |
| | | GACGGCTGATCTACAAGGTGTCCAACAGAGACTCTGGCGTGCCCGACAG |
| | | ATTCACCGGCTCTGGCTCTGGCACCACATTCACCCTGACCATCTCCAGAG |
| | | TGGAAGCCGAGGACGTGGGCATCTACTACTGTATGCAGGGCACCCACTG |
| | | GCCTCTGACCTTTGGCCAGGGAACAAAGGTGGAAATCAAG |
| SEQ ID | αhCCR2 | GAGGTGCAGCTGGTTGAATCTGGCGGAGGATTGGTTCAGCCTGGCGGCT |
| NO: 21 | 43G12 VH | CTCTGAGACTGTCTTGTGTGGCCTCTGGCTTCACCTTCTCCGACTACTGG |
| | | ATGTCCTGGGTCCGACAGGCTCCTGGCAAAGGACTGGAATGGGTCGCCA |
| | | ACATCAAGAAAGACGGCTCCGTGAACTACTACGTGGACTCCGTGAAGGG |
| | | CAGATTCACCATCTCTCGGGACAACGCCAAGAACTCCCTGTACCTGCAG |
| | | ATGAACAGCCTGAGAGCCGAGGACACCGCCGTGTACTACTGCACCAGAT |
| | | TCGATTACTGGGGCCAGGGCACCCTGGTCACAGTGTCCTCT |
| SEQ ID | αhCCR2 | CAGGCTGGCTTGACCCAGCCTCCTAGCGTTTCCAAGGGCCTGAGACAGA |
| NO: 22 | 43G12 VL | CCGCCACACTGACCTGTACCGGCAACTCTAACAACGTGGGCAATCAGGG |
| | | CGCTGCCTGGTTGCAGCAGCATCAGGGACATCCTCCAAAGCTGCTGTTCT |
| | | ACCGGAACAACAACAGAGCCTCCGGCATCTCCGAGCGGCTGTCTGCTTC |
| | | TAGATCCGGCAATACCGCCAGCCTGACCATCACTGGACTGCAGCCTGAG |
| | | GACGAGGCCGACTACTATTGCCTGACCTGGGACTCCTCTCTGTCCGTGGT |
| | | GGTTTTTGGCGGAGGCACCAAGCTGACAGTGCTG |
| SEQ ID | αhCSF1R | CAGGTGCAGCTGGTTCAGTCTGGCGCCGAAGTGAAGAAACCTGGCGCCT |
| NO: 23 | emactuzumab | CTGTGAAGGTGTCCTGCAAGGCTTCCGGCTACACCTTTACCAGCTACGAC |
| | VH | ATCTCCTGGGTCCGACAGGCTCCTGGACAAGGCTTGGAATGGATGGGCG |
| | | TGATCTGGACCGATGGCGGCACCAATTACGCCCAGAAACTGCAGGGCAG |
| | | AGTGACCATGACCACCGACACCTCTACCTCCACCGCCTACATGGAACTG |
| | | CGGTCCCTGAGATCTGACGACACCGCCGTGTACTACTGCGCCAGAGATC |
| | | AGCGGCTGTACTTCGATGTGTGGGGCCAGGGCACAACCGTGACAGTGTC |
| | | CTCT |
| SEQ ID | αhCSF1R | GACATCCAGATGACCCAGTCTCCATCCTCTCTGTCCGCCTCTGTGGGCGA |
| NO: 24 | emactuzumab | CAGAGTGACCATCACCTGTAGAGCCTCCGAGGACGTGAACACCTACGTG |
| | VL | TCCTGGTATCAGCAGAAGCCCGGCAAGGCTCCCAAGCTGCTGATCTACG |
| | | CCGCCTCTAACAGATACACCGGCGTGCCCTCTAGATTCTCCGGCTCTGGC |
| | | TCTGGCACCGACTTTACCCTGACAATCTCCAGCCTGCAGCCTGAGGACTT |
| | | CGCCACCTACTACTGCCAGCAGTCCTTCAGCTACCCCACCTTTGGCCAGG |
| | | GCACCAAGCTGGAAATCAAG |
| SEQ ID | hFc Hole | GATAAGACCCACACCTGTCCTCCCTGCCCTGCCCCTGAACTGCTGGGCGG |
| NO: 25 | | ACCTAGCGTGTTCCTGTTCCCTCCAAAGCCCAAGGACACCCTGATGATCA |
| | | GCCGGACCCCTGAAGTGACCTGCGTGGTGGTGGATGTGTCCCACGAGGA |
| | | TCCCGAAGTGAAGTTCAATTGGTACGTGGACGGCGTGGAAGTGCACAAC |
| | | GCCAAGACCAAGCCCAGAGAGGAACAGTACAACAGCACCTACCGGGTG |
| | | GTGTCCGTGCTGACCGTGCTGCACCAGGACTGGCTGAACGGCAAAGAGT |
| | | ACAAGTGCAAGGTGTCCAACAAGGCCCTGCCAGCCCCTATCGAGAAAAC |
| | | CATCAGCAAGGCCAAGGGCCAGCCTAGAGAGCCTCAGGTCTGCACCCTG |
| | | CCTCCCAGCCGGGAAGAGATGACCAAGAACCAGGTGTCCCTGAGCTGCG |
| | | CCGTGAAGGGCTTCTACCCCTCCGATATCGCCGTGGAATGGGAGAGCAA |
| | | CGGCCAGCCCGAGAACAACTACAAGACCACCCCTCCCGTGCTGGACAGC |
| | | GACGGCAGCTTCTTCCTGGTGTCCAAACTGACCGTGGACAAGAGCCGGT |
| | | GGCAGCAGGGCAATGTGTTCAGCTGTAGCGTGATGCACGAGGCCCTGCA |
| | | CAACCACTACACCCAGAAGTCTCTGAGCCTGAGCCCTGGCAAA |
| SEQ ID | αhCSF1R | CAGGTGCAGCTGGTTCAGTCTGGCGCCGAAGTGAAGAAACCTGGCTCCT |
| NO: 26 | cabiralizumab | CCGTGAAGGTGTCCTGCAAGGCTTCTGGCTACACCTTTACCGACAACTAC |
| | VH | ATGATCTGGGTCCGACAGGCTCCTGGACAGGGACTTGAGTGGATGGGCG |
| | | ACATCAACCCTTACAACGGCGGCACCACCTTCAACCAGAAATTCAAGGG |
| | | CAGAGTGACCATCACCGCCGACAAGTCTACCTCCACCGCCTACATGGAA |
| | | CTGTCCAGCCTGAGATCTGAGGACACCGCCGTGTACTACTGCGCCAGAG |
| | | AGTCCCCTTACTTCTCCAACCTGTACGTGATGGACTACTGGGGCCAGGGC |
| | | ACACTGGTCACAGTGTCCTCT |
| SEQ ID | αhCSF1R | GAGATCGTGCTGACCCAGTCTCCTGCCACACTGTCACTGTCTCCAGGCGA |
| NO: 27 | cabiralizumab | GAGAGCTACCCTGTCCTGCAAGGCTTCTCAGTCCGTGGACTACGACGGC |
| | VL | GACAACTACATGAACTGGTATCAGCAGAAGCCCGGCCAGGCTCCTAGAC |
| | | TGCTGATCTACGCCGCCTCCAACCTGGAATCTGGCATCCCCGCTAGATTC |
| | | TCCGGCTCTGGCTCTGGCACAGACTTTACCCTGACCATCTCCAGCCTGGA |
| | | ACCTGAGGACTTCGCCGTGTACTACTGCCACCTGTCCAACGAGGACCTGT |
| | | CCACATTTGGCGGAGGCACCAAGGTGGAAATCAAG |

TABLE 2
Sequences used to construct ORFs.

| Full length | Variable | Constant | Fc |
|---|---|---|---|
| SEQ ID NO: 28 | SEQ ID NO: 1 | SEQ ID NO: 3 | SEQ ID NO: 9 |
| SEQ ID NO: 29 | SEQ ID NO: 2 | SEQ ID NO: 4 | |
| SEQ ID NO: 30 | SEQ ID NO: 5 | SEQ ID NO: 6 | SEQ ID NO: 10 |
| SEQ ID NO: 31 | SEQ ID NO: 7 | SEQ ID NO: 8 | |
| SEQ ID NO: 32 | SEQ ID NO: 11 | SEQ ID NO: 12 | SEQ ID NO: 13 |
| SEQ ID NO: 33 | SEQ ID NO: 14 | SEQ ID NO: 15 | |
| SEQ ID NO: 34 | SEQ ID NO: 16 | SEQ ID NO: 12 | SEQ ID NO: 13 |
| SEQ ID NO: 35 | SEQ ID NO: 17 | SEQ ID NO: 18 | |
| SEQ ID NO: 36 | SEQ ID NO: 19 | SEQ ID NO: 12 | SEQ ID NO: 13 |
| SEQ ID NO: 37 | SEQ ID NO: 20 | SEQ ID NO: 15 | |
| SEQ ID NO: 38 | SEQ ID NO: 21 | SEQ ID NO: 12 | SEQ ID NO: 13 |
| SEQ ID NO: 39 | SEQ ID NO: 22 | SEQ ID NO: 18 | |
| SEQ ID NO: 40 | SEQ ID NO: 23 | SEQ ID NO: 12 | SEQ ID NO: 25 |
| SEQ ID NO: 41 | SEQ ID NO: 24 | SEQ ID NO: 15 | |
| SEQ ID NO: 42 | SEQ ID NO: 26 | SEQ ID NO: 12 | SEQ ID NO: 25 |
| SEQ ID NO: 43 | SEQ ID NO: 27 | SEQ ID NO: 15 | |

TABLE 3
Nucleic acid sequences of ORFs.

| | Nucleic Acid Sequence |
|---|---|
| SEQ ID | ATGGAAACCGACACACTGCTGCTGTGGGTGCTGCTCTTGTGGGTGCCAGGATCTACAGG |
| NO: 28 | ACAGGTCCAGCTGCAAGAGTCTGGCCCTGGACTGGTTCAGCCCTCTCAGACCCTGTCTCT |
| | GACCTGTACCGTGTCCGGCTTCTCCCTGACCGACTTCTCTGTGCACTGGGTCCGACAGCC |
| | TCCAGGCAAAGGACTGGAATGGATGGGCAGAATCAGATCCGAGGGCAACACCGACTAC |
| | AACAGCGCCCTGAAGTCCCGGCTGTCTATCAGCAGAGACACCTCCAAGAGCCAGGTGTT |
| | CCTGAAGATGAACTCCCTGCAGACCGAGGACACCGCCATCTATTTCTGCACCAGAGGCG |
| | ACATCCTCGGCTTCGGCTATTGGGGACAGGGCGTGATGGTCACCGTTAGCTCTGCTCAG |
| | ACCACCGCTCCTAGCGTGTACCCTTTGGCTCCTGGCTGTGGCGACACCACCTCTTCTACA |
| | GTGACCCTGGGCTGTCTGGTCAAGGGCTACTTTCCTGAGCCTGTGACCGTGACCTGGAAC |
| | TCTGGTGCCCTGTCCTCCGACGTGCACACCTTTCCAGCTGTGCTGCAGTCCGGCCTGTAC |
| | ACCCTGACATCCTCCGTGACCTCTTCCACCTGGCCTAGCCAGACCGTGACATGCAATGTG |
| | GCTCACCCTGCCTCCAGCACCAAGGTGGACAAGAAGGTGGAACGGCGGACCATTAAGC |
| | CTTGTCCTCCATGCAAGTGCCCCGCTCCTAATCTGCTCGGAGGCCCTTCCGTGTTCATCTT |
| | TCCACCTAAGATCAAGGACGTGCTGATGATCTCCCTGTCTCCTATCGTGACCTGCGTGGT |
| | GGTGGACGTGTCCGAGGATGATCCTGACGTGCAGATCAGTTGGTTCGTGAACAACGTGG |
| | AAGTGCACACCGCTCAGACCCAGACACACAGAGAGGACTACAACTCTACCCTGAGAGT |
| | GGTGTCTGCCCTGCCTATCCAGCATCAGGACTGGATGTCCGGCAAAGAATTCAAGTGCA |
| | AAGTGAACAACAAGGACCTGCCTGCTCCAATCGAGCGGACCATCTCTAAGCCTAAGGGC |
| | TCTGTCAGGGCCCCTCAGGTGTACGTTCTGCCTCCTTGCGAGGAAGAGATGACCAAGAA |
| | ACAAGTGACACTGTGGTGCATGGTCACAGACTTCATGCCCGAGGACATCTACGTGGAAT |
| | GGACCAACAACGGCAAGACCGAGCTGAACTACAAGAACACCGAGCCTGTGCTGGACTC |
| | CGACGGCTCCTACTTCATGTACTCCAAGCTGCGCGTCGAGAAGAAGAACTGGGTCGAGA |
| | GAAACTCCTACTCCTGCTCCGTGGTGCACGAGGGCCTGCACAATCACCACACCACCAAG |
| | TCCTTCTCTCGGACCCCTGGCAAGTGATGA |
| SEQ ID | ATGGAAACCGACACACTGCTGCTGTGGGTGCTGCTCTTGTGGGTGCCAGGATCTACCGG |
| NO: 29 | CGACATCGTGATGACCCAGTCTCCACTGTCCGTGTCTGTGACCCCTGGCGAGTCTGCCTC |
| | CATCTCCTGCAGATCCTCCAAGAGCCTGCTGCACTTCAAGGGCATCACCTTCGTGTACTG |
| | GTATCTGCAGAAGCCCGGCCAGTCTCCTCAGCTGCTGATCTTCAGAATGTCCAGCCTGGC |
| | CTCTGGCGTGCCCGATAGATTTTCTGGCTCCGGCTCCGAGACAGACTTCACCCTGAAGAT |
| | CTCCAGAGTGGAAGCCGAGGACGTGGGCACCTACTATTGTGGCCAGCTGCTGGAAAACC |
| | CCTACACCTTTGGCGCTGGCACCAAGCTGGAACTGAAGAGAGCTGACGCTGCCCCTACC |
| | GTGTCTATCTTCCCTCCATCCATGGAACAGCTGACCTCTGGCGGAGCTACCGTCGTGTGC |
| | TTCGTGAACAACTTCTACCCTCGGGACATCTCCGTGAAGTGGAAGATCGACGGCTCTGA |
| | GCAGCGAGATGGCGTGCTGGATTCTGTGACCGACCAGGACTCCAAGGACAGCACCTACT |
| | CCATGTCTAGCACCCTGAGCCTGACCAAGGTGGAATACGAGCGGCACAACCTGTATACC |
| | TGCGAGGTGGTGCACAAGACCTCCAGCTCTCCCGTGGTCAAGTCCTTCAACCGGAACGA |
| | GTGCTGATGA |
| SEQ ID | ATGGAAACCGACACACTGCTGCTGTGGGTGCTGCTCTTGTGGGTGCCAGGATCTACAGG |
| NO: 30 | ACAGGTCCAGTTGCAGCAGTCTGGCGCTGAGCTGGTCAAGCCTGGATCCTCCGTGAAGA |
| | TCTCCTGCAAGGCCTCCGGCTACACCTTCACCTCCAACTTCATGCACTGGATCAAGCAGC |
| | AGCCCGGCAACGGCCTGGAATGGATCGGATGGATCTATCCTGGCGACGGCGACACCGA |
| | GTACAACCAGAAGTTCAACGGCAAGGCTACCCTGACCGCCGACAAGTCCTCTTCCACCG |
| | CTTACATGCAGCTGTCCAGCCTGACCTCTGAGGACTCCGCCGTGTACTTCTGCGCCGTGA |
| | ATTATGGCGGCTACGTGCTGGATGCTTGGGGCCAAGGCGCTTCTGTGACAGTGTCCTCTG |
| | CCGAGACAACCGCTCCTAGCGTTTACCCTCTGGCTCCTGGCACAGCCCTGAAGTCCAACT |
| | CTATGGTCACCCTGGGCTGCCTGGTCAAGGGCTACTTTCCTGAGCCTGTGACCGTGACCT |
| | GGAACTCTGGTGCTCTGTCTAGCGGCGTGCACACCTTTCCAGCTGTGCTGCAGAGCGGCC |
| | TGTACACCCTGACATCTAGCGTGACCGTGCCTTCCAGCACCTGGTCTAGTCAGGCTGTGA |
| | CCTGCAACGTGGCCCATCCTGCCTCTTCTACCAAGGTGGACAAGAAAATCGTGCCCAGA |
| | GAGTGCAACACCATCAAGCCCTGTCCTCCATGCAAGTGCCCCGCTCCTAATCTGCTCGGA |
| | GGCCCTTCCGTGTTCATCTTCCCACCTAAGATCAAGGACGTGCTGATGATCTCCCTGTCT |
| | CCTATCGTGACCTGCGTGGTGGTGGACGTGTCCGAGGATGATCCTGACGTGCAGATCAG |
| | TTGGTTCGTGAACAACGTGGAAGTGCACACCGCTCAGACCCAGACACACAGAGAGGACT |
| | ACAACAGCACCCTGAGAGTGGTGTCTGCCCTGCCAATCCAGCACCAGGATTGGATGTCC |
| | GGCAAAGAATTCAAGTGCAAAGTGAACAACAAGGACCTGCCTGCTCCAATCGAGCGGA |
| | CCATCTCTAAGCCTAAGGGCTCTGTGCGGGCTCCCCAAGTTTGTGTTCTGCCTCCACCTG |
| | AGGAAGAGATGACCAAGAAACAAGTGACCCTGTCTTGTGCCGTGACCGACTTCATGCCC |
| | GAGGACATCTACGTGGAATGGACCAACAATGGCAAGACCGAGCTGAACTACAAGAACA |
| | CCGAGCCTGTGCTGGACTCCGACGGCTCCTACTTCATGGTGTCTAAGCTGCGCGTCGAGA |
| | AGAAGAACTGGGTCGAGAGAAACTCCTACTCCTGCTCCGTGGTGCACGAGGGCCTGCAC |
| | AATCACCACACCACCAAGTCCTTCTCTCGGACCCCTGGCAAGTGATGA |
| SEQ ID | ATGGAAACCGACACACTGCTGCTGTGGGTGCTGCTCTTGTGGGTGCCAGGATCTACAGG |
| NO: 31 | CGAGATCGTGCTGACCCAGTCTCCTACCACCATGGCTGCTAGCCCTGGCGAGAAAGTGA |
| | CAATTACCTGCCGGGCCTCCTCCTCCACCAACTACATGTCCTGGTATCAGCAGAAGTCCG |
| | GCGCCTCTCCTAAGCCTTGGATCTACGAGACATCCAAGCTGGCCTCTGGCGTGCCCGATA |
| | GATTTTCCGGCTCTGGCTCCGGCACCTCCTACAGCTTCACCATCTCCAGCATGGAAACAG |
| | AGGACGCCGCCACCTACTACTGCCACCAGTGGTCATCTACCCCTCTGACCTTTGGCAGCG |
| | GCACCAAGCTGGAAATCAAGAGAGCTGACGCCGCTCCTACCGTGTCTATCTTCCCTCCAT |
| | CCATGGAACAGCTGACCTCCGGCGGAGCTACCGTCGTGTGTTTCGTGAACAACTTCTACC |
| | CTCGGGACATCTCCGTGAAGTGGAAGATCGACGGCTCTGAGCAGCGAGATGGCGTGCTG |
| | GATTCTGTGACCGACCAGGACTCCAAGGACAGCACCTACTCCATGTCTAGCACCCTGAG |
| | CCTGACCAAGGTGGAATACGAGCGGCACAACCTGTATACCTGCGAGGTGGTGCACAAG |
| | ACCTCCAGCTCTCCCGTGGTCAAGTCCTTCAACCGGAACGAGTGCTGATGA |
| SEQ ID | ATGGAAACCGACACACTGCTGCTGTGGGTGCTGCTCTTGTGGGTGCCAGGATCTACAGG |
| NO: 32 | CGAGGTGCAGCTGGTTGAATCTGGCGGAGGACTGGTTAAGCCTGGCGGCTCTCTGAGAC |
| | TGTCTTGTGCCGCTTCTGGCTTCACCTTCTCCGCCTACGCCATGAACTGGGTCCGACAGG |
| | CTCCTGGCAAAGGCCTGGAATGGGTCGGAAGAATCCGGACCAAGAACAACAACTACGC |
| | CACCTACTACGCCGACTCCGTGAAGGACCGGTTCACCATCTCTCGGGACGACTCCAAGA |
| | ACACCCTGTACCTGCAGATGAACTCCCTGAAAACCGAGGACACCGCCGTGTACTACTGC |
| | ACCACCTTCTACGGCAATGGCGTGTGGGGACAGGGCACACTGGTTACCGTTTCTTCCGCC |
| | TCCACCAAGGGACCCTCTGTGTTTCCTCTGGCTCCCTCCAGCAAGTCTACCTCTGGTGGA |
| | ACAGCTGCCCTGGGCTGCCTGGTCAAGGATTACTTTCCTGAGCCTGTGACCGTGTCCTGG |
| | AACTCTGGCGCTCTGACATCTGGCGTGCACACCTTTCCAGCTGTGCTGCAGTCCTCTGGC |
| | CTGTACTCTCTGTCCTCCGTCGTGACCGTGCCTTCTAGCTCTCTGGGCACCCAGACCTAC |
| | ATCTGCAATGTGAACCACAAGCCTTCCAACACCAAGGTGGACAAGAGAGTGGAACCCA |
| | AGTCCTGCGACAAGACCCACACCTGTCCTCCATGTCCTGCTCCAGAACTGCTCGGCGGA |
| | CCTTCCGTGTTCCTGTTTCCTCCAAAGCCTAAGGACACCCTGATGATCTCTCGGACCCCT |
| | GAAGTGACCTGCGTGGTGGTGGATGTGTCTCACGAGGATCCCGAAGTGAAGTTCAATTG |
| | GTACGTGGACGGCGTGGAAGTGCACAACGCCAAGACCAAGCCTAGAGAGGAACAGTAC |
| | AACTCCACCTACAGAGTGGTGTCCGTGCTGACCGTGCTGCACCAGGATTGGCTGAACGG |
| | CAAAGAGTACAAGTGCAAGGTGTCCAACAAGGCCCTGCCTGCTCCTATCGAAAAGACCA |
| | TCTCCAAGGCCAAGGGCCAGCCTAGGGAACCCCAGGTTTACACCCTGCCTCCATGCCGG |
| | GAAGAGATGACCAAGAATCAGGTGTCCCTGTGGTGCCTCGTGAAGGGCTTCTACCCTTC |
| | CGATATCGCCGTGGAATGGGAGAGCAATGGCCAGCCTGAGAACAACTACAAGACAACC |
| | CCTCCTGTGCTGGACTCCGACGGCTCATTCTTCCTGTACTCCAAGCTGACAGTGGACAAG |
| | TCCAGATGGCAGCAGGGCAACGTGTTCTCCTGCTCCGTGATGCACGAGGCCCTGCACAA |
| | TCACTACACCCAGAAGTCCCTGTCTCTGTCCCCTGGCAAGTGATGA |
| SEQ ID | ATGGAAACCGACACACTGCTGCTGTGGGTGCTGCTCTTGTGGGTGCCAGGATCTACAGG |
| NO: 33 | CGACGTGGTCATGACACAGAGCCCTCTGTCTCTGCCCGTGACATTGGGACAGCCTGCCTC |
| | CATCTCCTGCAAGTCCTCTCAGTCCCTGCTGGACTCTGACGGCAAGACCTTCCTGAACTG |
| | GTTCCAGCAGCGGCCTGGCCAGTCTCCTAGAAGGCTGATCTACCTGGTGTCCAAGCTGG |
| | ATTCTGGCGTGCCCGACAGATTCTCCGGCTCTGGCTCTGGCACCGACTTCACCCTGAAGA |
| | TCTCCAGAGTGGAAGCCGAGGACGTGGGCGTGTACTACTGTTGGCAGGGCACCCACTTT |
| | CCATACACCTTCGGCCAGGGCACCAGACTGGAAATCAAGAGAACCGTGGCCGCTCCTTC |
| | CGTGTTCATCTTCCCACCTTCCGACGAGCAGCTGAAGTCCGGCACAGCTTCTGTCGTGTG |
| | CCTGCTGAACAACTTCTACCCTCGGGAAGCCAAGGTGCAGTGGAAGGTGGACAATGCCC |
| | TGCAGTCCGGCAACTCCCAAGAGTCTGTGACCGAGCAGGACTCCAAGGACAGCACCTAC |
| | AGCCTGTCCAGCACACTGACCCTGTCCAAGGCCGACTACGAGAAGCACAAGGTGTACGC |
| | CTGCGAAGTGACCCATCAGGGCCTGTCTAGCCCTGTGACCAAGTCTTTCAACCGGGGCG |
| | AGTGCTGATGA |
| SEQ ID | ATGGAAACCGACACACTGCTGCTGTGGGTGCTGCTCTTGTGGGTGCCAGGATCTACAGG |
| NO: 34 | CGAAGTGCAGCTGGTTCAGTCTGGCGCCGAAGTGAAGAAACCTGGCGCCTCTGTGAAGG |
| | TGTCCTGCAAGGCTTCTGGCTACACCTTTACCGGCTACCACATGCACTGGGTCCGACAGG |
| | CTCCAGGACAAGGCTTGGAATGGATGGGCTGGATCAACCCCAACTCCGGCGTGACCAAA |
| | TACGCCCAGAAATTCCAGGGCAGAGTGACCATGACCAGAGACACCTCCATCAACACCGC |
| | CTACATGGAACTGTCCCGGCTGAGATTCGACGACACCGACGTGTACTACTGTGCCACCG |
| | GCGGCTTTGGCTATTGGGGAGAGGGAACACTGGTCACCGTGTCCTCCGCTTCTACCAAG |
| | GGACCCTCCGTGTTTCCTCTGGCTCCTTCCAGCAAGTCTACCTCCGGTGGAACAGCTGCT |
| | CTGGGCTGCCTGGTCAAGGACTACTTTCCTGAGCCTGTGACCGTGTCTTGGAACTCTGGC |
| | GCTCTGACATCCGGCGTGCACACCTTTCCAGCTGTGCTGCAATCCTCCGGCCTGTACTCT |
| | CTGTCCTCCGTCGTGACCGTGCCTTCTAGCTCTCTGGGCACCCAGACCTACATCTGCAAT |
| | GTGAACCACAAGCCTTCCAACACCAAGGTGGACAAGAGAGTGGAACCCAAGTCCTGCG |
| | ACAAGACCCACACCTGTCCTCCATGTCCTGCTCCAGAACTGCTCGGCGGACCTTCTGTGT |
| | TCCTGTTTCCTCCAAAGCCTAAGGACACCCTGATGATCTCTCGGACCCCTGAAGTGACCT |
| | GCGTGGTGGTGGATGTGTCTCACGAGGACCCAGAAGTGAAGTTCAATTGGTACGTGGAC |
| | GGCGTGGAAGTGCACAACGCCAAGACCAAGCCTAGAGAGGAACAGTACAACTCCACCT |
| | ACAGAGTGGTGTCCGTGCTGACCGTGCTGCACCAGGATTGGCTGAACGGCAAAGAGTAC |
| | AAGTGCAAGGTGTCCAACAAGGCCCTGCCTGCTCCTATCGAAAAGACCATCTCCAAGGC |
| | CAAGGGCCAGCCTAGGGAACCCCAGGTTTACACCCTGCCTCCATGCCGGGAAGAGATGA |
| | CCAAGAACCAGGTGTCCCTGTGGTGCCTCGTGAAGGGCTTCTACCCTTCCGATATCGCCG |
| | TGGAATGGGAGAGCAATGGCCAGCCTGAGAACAACTACAAGACAACCCCTCCTGTGCTG |
| | GACTCCGACGGCTCATTCTTCCTGTACTCCAAGCTGACAGTGGACAAGTCCAGATGGCA |
| | GCAGGGCAACGTGTTCTCCTGCTCCGTGATGCACGAGGCCCTGCACAATCACTACACAC |
| | AGAAGTCCCTGTCTCTGTCCCCTGGCAAGTGATGA |
| SEQ ID | ATGGAAACCGACACACTGCTGCTGTGGGTGCTGCTCTTGTGGGTGCCAGGATCTACAGG |
| NO: 35 | ACTGCCCGTGTTGACCCAGCCTCCTAGCGTTTCCAAGGGCCTGAGACAGACCGCCACAC |
| | TGACCTGTACCGGCAACTCTAACAACGTGGGCAATCAGGGCGCTGCCTGGTTGCAGCAG |
| | CATCAGGGACAGCCTCCAAAGCTGCTGTCCTACCGGAACCACAACAGACCTAGCGGCGT |
| | GTCCGAGCGGTTCAGCCCTTCTAGATCTGGCGACACCTCCAGCCTGACCATCACTGGACT |
| | GCAGCCTGAGGACGAGGCCGACTACTATTGTCTGGCCTGGGACAGCTCCCTGCGGGCCT |
| | TTGTTTTTGGCACCGGCACCAAGCTGACCGTGCTGGGACAACCTAAGGCCAATCCTACC |
| | GTGACACTGTTCCCTCCATCCTCCGAGGAACTGCAGGCCAACAAGGCTACCCTCGTGTG |
| | CCTGATCTCCGACTTTTACCCTGGCGCTGTGACCGTGGCCTGGAAGGCTGATGGATCTCC |
| | TGTGAAGGCTGGCGTGGAAACCACCAAGCCTTCCAAGCAGTCCAACAACAAATACGCCG |
| | CCTCCTCCTACCTGTCTCTGACCCCTGAACAGTGGAAGTCCCACCGGTCCTACAGCTGCC |
| | AAGTGACCCATGAGGGCTCCACCGTGGAAAAGACCGTGGCTCCTACCGAGTGCTCCTGA |
| | TGA |
| SEQ ID | ATGGAAACCGACACACTGCTGCTGTGGGTGCTGCTCTTGTGGGTGCCAGGATCTACAGG |
| NO: 36 | ACAGGTGCAGCTGGTTCAGTCTGGCGCCGAAGTGAAGAAACCTGGCGCCTCTGTGAAGG |
| | TGTCCTGCAAGGCTTCCGGCTACACCTTCTCCAGCTACTACATGCACTGGGTCCGACAGG |
| | CCCCTGGACAAGGATTGGAGTGGATGGGCATCATCAACCCCTCTGGCGGCAACACCTCT |
| | TACGCCCAGAAATTCCAGGGCAGAGTGACCATGACCAGAGACACCTCCACCAGCACCGT |
| | GTACATGGAACTGTCCAGCCTGAGATCCGAGGACACCGCCGTGTACTACTGTGCCAGAG |
| | GCGGATACCAGCTGCCTCACGGTAGAGCCAGAGCCTTCGATATGTGGGGCCAGGGCACA |
| | ATGGTCACCGTGTCCTCTGCTTCCACCAAGGGACCCTCTGTGTTCCCTCTGGCTCCTTCCA |
| | GCAAGTCCACATCCGGTGGAACAGCTGCTCTGGGCTGCCTGGTCAAGGACTACTTTCCT |
| | GAGCCTGTGACCGTGTCTTGGAACTCTGGCGCTCTGACATCCGGCGTGCACACATTTCCA |
| | GCTGTGCTGCAGTCCTCCGGCCTGTACTCTCTGTCCTCTGTCGTGACCGTGCCTTCCAGCT |
| | CTCTGGGAACCCAGACCTACATCTGCAATGTGAACCACAAGCCTTCCAACACCAAGGTG |
| | GACAAGAGAGTGGAACCCAAGTCCTGCGACAAGACCCACACCTGTCCACCATGTCCTGC |
| | TCCAGAACTGCTCGGCGGACCTTCCGTGTTCCTGTTTCCTCCAAAGCCTAAGGACACCCT |
| | GATGATCTCTCGGACCCCTGAAGTGACCTGCGTGGTGGTGGATGTGTCCCACGAGGACC |
| | CAGAAGTGAAGTTCAATTGGTACGTGGACGGCGTGGAAGTGCACAACGCCAAGACCAA |
| | GCCTAGAGAGGAACAGTACAACTCCACCTACAGAGTGGTGTCCGTGCTGACCGTGCTGC |
| | ACCAGGATTGGCTGAACGGCAAAGAGTACAAGTGCAAGGTGTCCAACAAGGCCCTGCC |
| | TGCTCCTATCGAAAAGACCATCTCCAAGGCCAAGGGCCAGCCTAGGGAACCCCAGGTTT |
| | ACACCCTGCCTCCATGCCGGGAAGAGATGACCAAGAACCAGGTGTCCCTGTGGTGCCTC |
| | GTGAAGGGCTTCTACCCTTCCGATATCGCCGTGGAATGGGAGAGCAATGGCCAGCCAGA |
| | GAACAACTACAAGACAACCCCTCCTGTGCTGGACTCCGACGGCTCATTCTTCCTGTACTC |
| | CAAGCTGACAGTGGACAAGTCCAGATGGCAGCAGGGCAACGTGTTCTCCTGCTCCGTGA |
| | TGCACGAGGCCCTGCACAATCACTACACACAGAAGTCCCTGTCTCTGTCCCCTGGCAAG |
| | TGATGA |
| SEQ ID | ATGGAAACCGACACACTGCTGCTGTGGGTGCTGCTCTTGTGGGTGCCAGGATCTACCGG |
| NO: 37 | CGCCATCAGAATGACCCAGTCTCCACTGAGCCTGCCTGTGACATTGGGCCAGCCTGCCTC |
| | TATCTCCTGCACCTCCTCTCAGTCTCTGGTGTACAGAGATGGCACCACCTACCTGAACTG |
| | GTTCCAGCAGAGGCCTGGCCAGTCTCCTAGACGGCTGATCTACAAGGTGTCCAACAGAG |
| | ACTCTGGCGTGCCCGACAGATTCACCGGCTCTGGCTCTGGCACCACATTCACCCTGACCA |
| | TCTCCAGAGTGGAAGCCGAGGACGTGGGCATCTACTACTGTATGCAGGGCACCCACTGG |
| | CCTCTGACCTTTGGCCAGGGAACAAAGGTGGAAATCAAGCGGACCGTGGCCGCTCCTTC |
| | CGTGTTCATCTTCCCACCTTCCGACGAGCAGCTGAAGTCTGGCACAGCCTCTGTCGTGTG |
| | CCTGCTGAACAACTTCTACCCTCGGGAAGCCAAGGTGCAGTGGAAGGTGGACAATGCCC |
| | TGCAGTCCGGCAACTCCCAAGAGTCTGTGACCGAGCAGGACTCCAAGGACAGCACCTAC |
| | AGCCTGTCCTCCACACTGACCCTGTCCAAGGCCGACTACGAGAAGCACAAGGTGTACGC |
| | CTGCGAAGTGACCCATCAGGGCCTGTCTAGCCCTGTGACCAAGTCTTTCAACCGGGGCG |
| | AGTGCTGATGA |
| SEQ ID | ATGGAAACCGACACACTGCTGCTGTGGGTGCTGCTCTTGTGGGTGCCAGGATCTACAGG |
| NO: 38 | CGAGGTGCAGCTGGTTGAATCTGGCGGAGGATTGGTTCAGCCTGGCGGCTCTCTGAGAC |
| | TGTCTTGTGTGGCCTCTGGCTTCACCTTCTCCGACTACTGGATGTCCTGGGTCCGACAGG |
| | CTCCTGGCAAAGGACTGGAATGGGTCGCCAACATCAAGAAAGACGGCTCCGTGAACTAC |
| | TACGTGGACTCCGTGAAGGGCAGATTCACCATCTCTCGGGACAACGCCAAGAACTCCCT |
| | GTACCTGCAGATGAACAGCCTGAGAGCCGAGGACACCGCCGTGTACTACTGCACCAGAT |
| | TCGATTACTGGGGCCAGGGCACCCTGGTCACAGTGTCCTCTGCTTCTACCAAGGGACCC |
| | AGCGTGTTCCCTCTGGCTCCTTCCAGCAAGTCTACCTCTGGCGGAACAGCTGCTCTGGGC |
| | TGCCTGGTCAAGGACTACTTTCCTGAGCCTGTGACCGTGTCCTGGAACTCTGGCGCTCTG |
| | ACATCTGGCGTGCACACCTTTCCAGCTGTGCTGCAGTCCTCCGGCCTGTACTCTCTGTCC |
| | TCTGTCGTGACCGTGCCTTCCAGCTCTCTGGGAACCCAGACCTACATCTGCAATGTGAAC |
| | CACAAGCCTTCCAACACCAAGGTGGACAAGAGAGTGGAACCCAAGTCCTGCGACAAGA |
| | CCCACACCTGTCCTCCATGTCCTGCTCCAGAACTGCTCGGCGGACCTTCCGTGTTCCTGT |
| | TTCCTCCAAAGCCTAAGGACACCCTGATGATCTCTCGGACCCCTGAAGTGACCTGCGTG |
| | GTGGTGGATGTGTCTCACGAGGATCCCGAAGTGAAGTTCAATTGGTACGTGGACGGCGT |
| | GGAAGTGCACAATGCCAAGACCAAGCCTAGAGAGGAACAGTACAACTCCACCTACAGA |
| | GTGGTGTCCGTGCTGACCGTGCTGCACCAGGATTGGCTGAACGGCAAAGAGTACAAGTG |
| | CAAGGTGTCCAACAAGGCCCTGCCTGCTCCTATCGAAAAGACCATCTCCAAGGCCAAGG |
| | GCCAGCCTAGGGAACCCCAGGTTTACACCCTGCCTCCATGCCGGGAAGAGATGACCAAG |
| | AACCAGGTGTCCCTGTGGTGCCTGGTTAAGGGCTTCTACCCCTCCGATATCGCCGTGGAA |
| | TGGGAGTCTAATGGCCAGCCAGAGAACAACTACAAGACAACCCCTCCTGTGCTGGACTC |
| | CGACGGCTCATTCTTCCTGTACTCCAAGCTGACAGTGGACAAGTCCAGATGGCAGCAGG |
| | GCAACGTGTTCTCCTGCTCCGTGATGCACGAGGCCCTGCACAATCACTACACCCAGAAG |
| | TCCCTGTCTCTGTCCCCTGGCAAGTGATGA |
| SEQ ID | ATGGAAACCGACACACTGCTGCTGTGGGTGCTGCTCTTGTGGGTGCCAGGATCTACAGG |
| NO: 39 | ACAGGCTGGCTTGACCCAGCCTCCTAGCGTTTCCAAGGGCCTGAGACAGACCGCCACAC |
| | TGACCTGTACCGGCAACTCTAACAACGTGGGCAATCAGGGCGCTGCCTGGTTGCAGCAG |
| | CATCAGGGACATCCTCCAAAGCTGCTGTTCTACCGGAACAACAACAGAGCCTCCGGCAT |
| | CTCCGAGCGGCTGTCTGCTTCTAGATCCGGCAATACCGCCAGCCTGACCATCACTGGACT |
| | GCAGCCTGAGGACGAGGCCGACTACTATTGCCTGACCTGGGACTCCTCTCTGTCCGTGGT |
| | GGTTTTTGGCGGAGGCACCAAGCTGACAGTGCTGGGACAGCCTAAGGCCAATCCTACCG |
| | TGACACTGTTCCCTCCATCCTCCGAGGAACTGCAGGCCAACAAGGCTACCCTCGTGTGCC |
| | TGATCTCCGACTTTTACCCTGGCGCTGTGACCGTGGCCTGGAAGGCTGATGGATCTCCTG |
| | TGAAGGCTGGCGTGGAAACCACCAAGCCTTCCAAGCAGTCCAACAACAAATACGCCGCC |
| | TCCTCCTACCTGTCTCTGACCCCTGAACAGTGGAAGTCCCACCGGTCCTACAGCTGCCAA |
| | GTGACCCATGAGGGCTCCACCGTGGAAAAGACCGTGGCTCCTACCGAGTGCTCCTGATG |
| | A |
| SEQ ID | ATGGAAACCGACACACTGCTGCTGTGGGTGCTGCTCTTGTGGGTGCCAGGATCTACAGG |
| NO: 40 | ACAGGTGCAGCTGGTTCAGTCTGGCGCCGAAGTGAAGAAACCTGGCGCCTCTGTGAAGG |
| | TGTCCTGCAAGGCTTCCGGCTACACCTTTACCAGCTACGACATCTCCTGGGTCCGACAGG |
| | CTCCTGGACAAGGCTTGGAATGGATGGGCGTGATCTGGACCGATGGCGGCACCAATTAC |
| | GCCCAGAAACTGCAGGGCAGAGTGACCATGACCACCGACACCTCTACCTCCACCGCCTA |
| | CATGGAACTGCGGTCCCTGAGATCTGACGACACCGCCGTGTACTACTGCGCCAGAGATC |
| | AGCGGCTGTACTTCGATGTGTGGGGCCAGGGCACAACCGTGACAGTGTCCTCTGCTTCC |
| | ACCAAGGGACCCAGCGTTTTCCCTCTGGCTCCATCCTCCAAGTCTACCTCTGGCGGAACA |
| | GCTGCTCTGGGCTGCCTGGTCAAGGACTACTTTCCTGAGCCTGTGACCGTGTCCTGGAAC |
| | TCTGGCGCTCTGACATCTGGCGTGCACACATTCCCTGCTGTGCTGCAGTCCTCCGGCCTG |
| | TACTCTCTGTCCTCTGTGGTTACCGTGCCTTCCTCTAGCCTGGGCACCCAGACCTACATCT |
| | GCAATGTGAACCACAAGCCTTCCAACACCAAGGTGGACAAGAGAGTGGAACCCAAGTC |
| | CTGCGACAAGACCCACACCTGTCCACCATGTCCTGCTCCAGAACTGCTCGGCGGACCTTC |
| | CGTGTTCCTGTTTCCTCCAAAGCCTAAGGACACCCTGATGATCTCTCGGACCCCTGAAGT |
| | GACCTGCGTGGTGGTGGATGTGTCTCACGAGGACCCAGAAGTGAAGTTCAATTGGTACG |
| | TGGACGGCGTGGAAGTGCACAACGCCAAGACCAAGCCTAGAGAGGAACAGTACAACTC |
| | CACCTACAGAGTGGTGTCCGTGCTGACCGTGCTGCACCAGGATTGGCTGAACGGCAAAG |
| | AGTACAAGTGCAAGGTGTCCAACAAGGCCCTGCCTGCTCCTATCGAAAAGACCATCTCC |
| | AAGGCCAAGGGCCAGCCTCGGGAACCTCAAGTCTGTACCCTGCCTCCTAGCCGGGAAGA |
| | GATGACCAAGAACCAGGTGTCCCTGAGCTGCGCCGTGAAGGGCTTCTACCCTTCTGATA |
| | TCGCCGTGGAATGGGAGAGCAACGGCCAGCCTGAGAACAACTACAAGACAACCCCTCC |
| | TGTGCTGGACTCCGACGGCTCATTCTTCCTGGTGTCCAAGCTGACAGTGGACAAGTCCAG |
| | ATGGCAGCAGGGCAACGTGTTCTCCTGCTCCGTGATGCACGAGGCCCTGCACAATCACT |
| | ACACACAGAAGTCCCTGTCTCTGTCCCCTGGCAAGTGATGA |
| SEQ ID | ATGGAAACCGACACACTGCTGCTGTGGGTGCTGCTCTTGTGGGTGCCAGGATCTACCGG |
| NO: 41 | CGACATCCAGATGACCCAGTCTCCATCCTCTCTGTCCGCCTCTGTGGGCGACAGAGTGAC |
| | CATCACCTGTAGAGCCTCCGAGGACGTGAACACCTACGTGTCCTGGTATCAGCAGAAGC |
| | CCGGCAAGGCTCCCAAGCTGCTGATCTACGCCGCCTCTAACAGATACACCGGCGTGCCC |
| | TCTAGATTCTCCGGCTCTGGCTCTGGCACCGACTTTACCCTGACAATCTCCAGCCTGCAG |
| | CCTGAGGACTTCGCCACCTACTACTGCCAGCAGTCCTTCAGCTACCCCACCTTTGGCCAG |
| | GGCACCAAGCTGGAAATCAAGCGGACAGTGGCCGCTCCTTCCGTGTTCATCTTCCCACCT |
| | TCCGACGAGCAGCTGAAGTCCGGCACAGCTTCTGTCGTGTGCCTGCTGAACAACTTCTAC |
| | CCTCGGGAAGCCAAGGTGCAGTGGAAGGTGGACAATGCCCTGCAGTCCGGCAACTCCCA |
| | AGAGTCTGTGACCGAGCAGGACTCCAAGGACAGCACCTACAGCCTGTCCTCCACACTGA |
| | CCCTGTCCAAGGCCGACTACGAGAAGCACAAGGTGTACGCCTGCGAAGTGACCCATCAG |
| | GGCCTGTCTAGCCCTGTGACCAAGTCTTTCAACCGGGGCGAGTGCTGATGA |
| SEQ ID | ATGGAAACCGACACACTGCTGCTGTGGGTGCTGCTCTTGTGGGTGCCAGGATCTACAGG |
| NO: 42 | ACAGGTGCAGCTGGTTCAGTCTGGCGCCGAAGTGAAGAAACCTGGCTCCTCCGTGAAGG |
| | TGTCCTGCAAGGCTTCTGGCTACACCTTTACCGACAACTACATGATCTGGGTCCGACAGG |
| | CTCCTGGACAGGGACTTGAGTGGATGGGCGACATCAACCCTTACAACGGCGGCACCACC |
| | TTCAACCAGAAATTCAAGGGCAGAGTGACCATCACCGCCGACAAGTCTACCTCCACCGC |
| | CTACATGGAACTGTCCAGCCTGAGATCTGAGGACACCGCCGTGTACTACTGCGCCAGAG |
| | AGTCCCCTTACTTCTCCAACCTGTACGTGATGGACTACTGGGGCCAGGGCACACTGGTCA |
| | CAGTGTCCTCTGCTTCCACCAAGGGACCCAGCGTTTTCCCTCTGGCTCCATCCTCCAAGT |
| | CCACCTCTGGTGGAACAGCTGCTCTGGGCTGCCTGGTCAAGGACTACTTTCCTGAGCCTG |
| | TGACCGTGTCCTGGAACTCTGGCGCTCTGACATCTGGCGTGCACACCTTTCCAGCTGTGC |
| | TGCAGTCCTCCGGCCTGTACTCTCTGTCCTCTGTCGTGACCGTGCCTTCCAGCTCTCTGGG |
| | AACCCAGACCTACATCTGCAATGTGAACCACAAGCCTTCCAACACCAAGGTCGACAAGA |
| | GAGTGGAACCCAAGTCCTGCGACAAGACCCACACCTGTCCACCTTGTCCTGCTCCAGAA |
| | CTGCTCGGCGGACCTTCCGTGTTCCTGTTTCCTCCAAAGCCTAAGGACACCCTGATGATC |
| | TCTCGGACCCCTGAAGTGACCTGCGTGGTGGTGGATGTGTCTCACGAGGACCCAGAAGT |
| | GAAGTTCAATTGGTACGTGGACGGCGTGGAAGTGCACAACGCCAAGACCAAGCCTAGA |
| | GAGGAACAGTACAACTCCACCTACAGAGTGGTGTCCGTGCTGACCGTGCTGCACCAGGA |
| | TTGGCTGAACGGCAAAGAGTACAAGTGCAAGGTGTCCAACAAGGCCCTGCCTGCTCCTA |
| | TCGAAAAGACCATCTCCAAGGCCAAGGGCCAGCCTCGGGAACCTCAAGTCTGTACCCTG |
| | CCTCCTAGCCGGGAAGAGATGACCAAGAACCAGGTGTCCCTGAGCTGCGCCGTGAAGG |
| | GCTTCTACCCTTCTGATATCGCCGTGGAATGGGAGAGCAACGGCCAGCCAGAGAACAAC |
| | TACAAGACAACCCCTCCTGTGCTGGACTCCGACGGCTCATTCTTCCTGGTGTCCAAGCTG |
| | ACAGTGGACAAGTCCAGATGGCAGCAGGGCAACGTGTTCTCCTGCTCCGTGATGCACGA |
| | GGCCCTGCACAATCACTACACACAGAAGTCTCTGTCTCTGAGCCCCGGCAAGTGATGA |
| SEQ ID | ATGGAAACCGACACACTGCTGCTGTGGGTGCTGCTCTTGTGGGTGCCAGGATCTACAGG |
| NO: 43 | CGAGATCGTGCTGACCCAGTCTCCTGCCACACTGTCACTGTCTCCAGGCGAGAGAGCTA |
| | CCCTGTCCTGCAAGGCTTCTCAGTCCGTGGACTACGACGGCGACAACTACATGAACTGG |
| | TATCAGCAGAAGCCCGGCCAGGCTCCTAGACTGCTGATCTACGCCGCCTCCAACCTGGA |
| | ATCTGGCATCCCCGCTAGATTCTCCGGCTCTGGCTCTGGCACAGACTTTACCCTGACCAT |
| | CTCCAGCCTGGAACCTGAGGACTTCGCCGTGTACTACTGCCACCTGTCCAACGAGGACC |
| | TGTCCACATTTGGCGGAGGCACCAAGGTGGAAATCAAGCGGACAGTGGCCGCTCCTTCC |
| | GTGTTCATCTTCCCACCTTCCGACGAGCAGCTGAAGTCTGGCACCGCTTCTGTCGTGTGC |
| | CTGCTGAACAACTTCTACCCTCGGGAAGCCAAGGTGCAGTGGAAGGTGGACAATGCCCT |
| | GCAGTCCGGCAACTCCCAAGAGTCTGTGACCGAGCAGGACTCCAAGGACAGCACCTACA |
| | GCCTGTCCTCCACACTGACCCTGTCCAAGGCCGACTACGAGAAGCACAAGGTGTACGCC |
| | TGCGAAGTGACCCATCAGGGCCTGTCTAGCCCTGTGACCAAGTCTTTCAACCGGGGCGA |
| | GTGCTGATGA |

### 2. Expression and Purification.

[0569] The plasmids were co-transfected into either Expi293 cells (Life Technologies A14527) or ExpiCHO cells (Life Technologies A29127). Transfections were performed using 1 mg of total DNA for a multispecific construct with a 1:1 knob to hole heavy chain ratio and 3:2 light chain to heavy chain ratio. When biotinylation was required, 250 μg of BirA was added per liter in addition to the multispecific construct DNA. Transfection in Expi293 cells was done using linear 25,000 Da polyethylenimine (PEI, Polysciences Inc 23966) in a 3:1 ratio with the total DNA. The DNA and PEI were each added to 50 mL of OptiMem (Life Technologies 31985088) medium and sterile filtered. The DNA and PEI were combined for 10 minutes and added to the Expi293 cells with a cell density of 1.8-2.8×10⁶ cells/mL and a viability of at least 95%. The ExpiCHO transfection was performed according to the manufacturer's instructions. Expi293 cells were grown in a humidified incubator at 37° C. with 8% CO₂ for 5-7 days after transfection and ExpiCHO cells were grown for 14 days at 32° C. with 5% CO₂. The cells were pelleted by centrifugation at 4500×g and the supernatant was filtered through a 0.2 μm membrane. Protein A resin (GE 17-1279-03) was added to the filtered supernatant and incubated for 1-3 hours at room temperature. The resin was packed into a column, washed with 3×10 column volumes of Dulbecco's phosphate-buffered saline (DPBS, Life Technologies 14190-144). The bound protein was eluted from the column with 20 mM citrate, 100 mM NaCl, pH 2.9. When necessary, the proteins were further purified using ligand affinity and/or size exclusion chromatography on a Superdex 200 column with a running buffer of DPBS.

TABLE 4
Amino Acid Sequences.

| SEQ ID NO | Description | Amino Acid Sequence |
|---|---|---|
| SEQ ID NO: 44 | αCCR2 MC12 | QVQLQESGPGLVQPSQTLSLTCTVSGFSLTDFSVHWVRQPPGKGL |
| | VH | EWMGRIRSEGNTDYNSALKSRLSISRDTSKSQVFLKMNSLQTEDT |
| | | AIYFCTRGDILGFGYWGQGVMVTVSS |
| SEQ ID NO: 45 | αCCR2 MC12 | DIVMTQSPLSVSVTPGESASISCRSSKSLLHFKGITFVYWYLQKPGQ |
| | VL | SPQLLIFRMSSLASGVPDRFSGSGSETDFTLKISRVEAEDVGTYYCG |
| | | QLLENPYTFGAGTKLELK |
| SEQ ID NO: 46 | R2b CH1 | AQTTAPSVYPLAPGCGDTTSSTVTLGCLVKGYFPEPVTVTWNSGA |
| | | LSSDVHTFPAVLQSGLYTLTSSVTSSTWPSQTVTCNVAHPASSTKV |
| | | DKKVERR |
| SEQ ID NO: 47 | R2b CL | RADAAPTVSIFPPSMEQLTSGGATVVCFVNNFYPRDISVKWKIDGS |
| | | EQRDGVLDSVTDQDSKDSTYSMSSTLSLTKVEYERHNLYTCEVVH |
| | | KTSSSPVVKSFNRNEC |
| SEQ ID NO: 48 | αmCSF1R VH | QVQLQQSGAELVKPGSSVKISCKASGYTFTSNFMHWIKQQPGNGL |
| | | EWIGWIYPGDGDTEYNQKFNGKATLTADKSSSTAYMQLSSLTSED |
| | | SAVYFCAVNYGGYVLDAWGQGASVTVSS |
| SEQ ID NO: 49 | R2a CH1 | AETTAPSVYPLAPGTALKSNSMVTLGCLVKGYFPEPVTVTWNSGA |
| | | LSSGVHTFPAVLQSGLYTLTSSVTVPSSTWSSQAVTCNVAHPASST |
| | | KVDKKIVPRECN |
| SEQ ID NO: 50 | αmCSF1R VL | EIVLTQSPTTMAASPGEKVTITCRASSSTNYMSWYQQKSGASPKP |
| | | WIYETSKLASGVPDRFSGSGSGTSYSFTISSMEIEDAATYYCHQWS |
| | | STPLTFGSGTKLEIK |
| SEQ ID NO: 51 | R2a CL | RADAAPTVSIFPPSMEQLTSGGATVVCFVNNFYPRDISVKWKIDGS |
| | | EQRDGVLDSVTDQDSKDSTYSMSSTLSLTKVEYERHNLYTCEVVH |
| | | KTSSSPVVKSFNRNEC |
| SEQ ID NO: 52 | mFc Knob | TIKPCPPCKCPAPNLLGGPSVFIFPPKIKDVLMISLSPIVTCVVVDVS |
| | | EDDPDVQISWFVNNVEVHTAQTQTHREDYNSTLRVVSALPIQHQD |
| | | WMSGKEFKCKVNNKDLPAPIERTISKPKGSVRAPQVYVLPPCEEE |
| | | MTKKQVTLWCMVTDFMPEDIYVEWTNNGKTELNYKNIEPVLDS |
| | | DGSYFMYSKLRVEKKNWVERNSYSCSVVHEGLHNHHTTKSFSRT |
| | | PGK |
| SEQ ID NO: 53 | mFc Hole | TIKPCPPCKCPAPNLLGGPSVFIFPPKIKDVLMISLSPIVTCVVVDVS |
| | | EDDPDVQISWFVNNVEVHTAQTQTHREDYNSTLRVVSALPIQHQD |
| | | WMSGKEFKCKVNNKDLPAPIERTISKPKGSVRAPQVCVLPPPEEE |
| | | MTKKQVTLSCAVTDFMPEDIYVEWTNNGKIELNYKNIEPVLDSD |
| | | GSYFMVSKLRVEKKNWVERNSYSCSVVHEGLHNHHTTKSFSRTP |
| | | GK |
| SEQ ID NO: 54 | αhCCR2 | EVQLVESGGGLVKPGGSLRLSCAASGFTFSAYAMNWVRQAPGKG |
| | plozalizumab | LEWVGRIRTKNNNYATYYADSVKDRFTISRDDSKNTLYLQMNSL |
| | VH | KTEDTAVYYCTTFYGNGVWGQGTLVTVSS |
| SEQ ID NO: 55 | hCH1 | ASTKGPSVFPLAPSSKSTSGGTAALGCLVKDYFPEPVTVSWNSGAL |
| | | TSGVHTFPAVLQSSGLYSLSSVVTVPSSSLGTQTYICNVNHKPSNT |
| | | KVDKRVEPKSC |
| SEQ ID NO: 56 | hFc Knob | DKTHTCPPCPAPELLGGPSVFLFPPKPKDTLMISRTPEVTCVVVDV |
| | | SHEDPEVKFNWYVDGVEVHNAKTKPREEQYNSTYRVVSVLTVLH |
| | | QDWLNGKEYKCKVSNKALPAPIEKTISKAKGQPREPQVYTLPPCR |
| | | EEMTKNQVSLWCLVKGFYPSDIAVEWESNGQPENNYKTTPPVLDS |
| | | DGSFFLYSKLTVDKSRWQQGNVFSCSVMHEALHNHYTQKSLSLSP |
| | | GX, wherein X is K or absent |
| SEQ ID NO: 57 | αhCCR2 | DVVMTQSPLSLPVTLGQPASISCKSSQSLLDSDGKTFLNWFQQRPG |
| | plozalizumab | QSPRRLIYLVSKLDSGVPDRFSGSGSGTDFTLKISRVEAEDVGVYY |
| | VL | CWQGTHFPYTFGQGTRLEIK |
| SEQ ID NO: 58 | hCL (kappa) | RTVAAPSVFIFPPSDEQLKSGTASVVCLLNNFYPREAKVQWKVDN |
| | | ALQSGNSQESVTEQDSKDSTYSLSSTLTLSKADYEKHKVYACEVT |
| | | HQGLSSPVTKSFNRGEC |
| SEQ ID NO: 59 | αhCCR2 D1 | EVQLVQSGAEVKKPGASVKVSCKASGYTFTGYHMHWVRQAPGQ |
| | VH | GLEWMGWINPNSGVTKYAQKFQGRVTMTRDTSINTAYMELSRLR |
| | | FDDTDVYYCATGGFGYWGEGTLVTVSS |
| SEQ ID NO: 60 | αhCCR2 D1 | LPVLTQPPSVSKGLRQTATLTCTGNSNNVGNQGAAWLQQHQGQP |
| | VL | PKLLSYRNHNRPSGVSERFSPSRSGDTSSLTITGLQPEDEADYYCLA |
| | | WDSSLRAFVFGTGTKLTVL |
| SEQ ID NO: 61 | hCL (lambda) | GQPKANPTVTLFPPSSEELQANKATLVCLISDFYPGAVTVAWKAD |
| | | GSPVKAGVETTKPSKQSNNKYAASSYLSLTPEQWKSHRSYSCQVT |
| | | HEGSTVEKTVAPIECS |
| SEQ ID NO: 62 | αhCCR2 42G7 | QVQLVQSGAEVKKPGASVKVSCKASGYTFSSYYMHWVRQAPGQ |
| | VH | GLEWMGIINPSGGNTSYAQKFQGRVTMTRDTSTSTVYMELSSLRS |
| | | EDTAVYYCARGGYQLPHGRARAFDMWGQGTMVTVSS |
| SEQ ID NO: 63 | αhCCR2 42G7 | AIRMTQSPLSLPVTLGQPASISCTSSQSLVYRDGTTYLNWFQQRPG |
| | VL | QSPRRLIYKVSNRDSGVPDRFTGSGSGTTFTLTISRVEAEDVGIYYC |
| | | MQGTHWPLTFGQGTKVEIK |
| SEQ ID NO: 64 | αhCCR2 43G12 | EVQLVESGGGLVQPGGSLRLSCVASGFTFSDYWMSWVRQAPGKG |
| | VH | LEWVANIKKDGSVNYYVDSVKGRFTISRDNAKNSLYLQMNSLRA |
| | | EDTAVYYCTRFDYWGQGTLVTVSS |
| SEQ ID NO: 65 | αhCCR2 43G12 | QAGLTQPPSVSKGLRQTATLTCTGNSNNVGNQGAAWLQQHQGHP |
| | VL | PKLLFYRNNNRASGISERLSASRSGNTASLTITGLQPEDEADYYCL |
| | | TWDSSLSVVVFGGGTKLTVL |
| SEQ ID NO: 66 | αhCSF1R | QVQLVQSGAEVKKPGASVKVSCKASGYTFTSYDISWVRQAPGQG |
| | emactuzumab | LEWMGVIWTDGGTNYAQKLQGRVTMTTDTSTSTAYMELRSLRSD |
| | VH | DTAVYYCARDQRLYFDVWGQGTTVTVSS |
| SEQ ID NO: 67 | αhC5F1R | DIQMTQSPSSLSASVGDRVTITCRASEDVNTYVSWYQQKPGKAPK |
| | emactuzumab | LLIYAASNRYTGVPSRFSGSGSGTDFTLTISSLQPEDFATYYCQQSF |
| | VL | SYPTFGQGTKLEIK |
| SEQ ID NO: 68 | hFc Hole | DKTHTCPPCPAPELLGGPSVFLFPPKPKDTLMISRTPEVTCVVVDV |
| | | SHEDPEVKFNWYVDGVEVHNAKTKPREEQYNSTYRVVSVLTVLH |
| | | QDWLNGKEYKCKVSNKALPAPIEKTISKAKGQPREPQVCTLPPSR |
| | | EEMTKNQVSLSCAVKGFYPSDIAVEWESNGQPENNYKTTPPVLDS |
| | | DGSFFLVSKLTVDKSRWQQGNVFSCSVMHEALHNHYTQKSLSLSP |
| | | GX, wherein X is K or absent |
| SEQ ID NO: 69 | αhCSF1R | QVQLVQSGAEVKKPGSSVKVSCKASGYTFTDNYMIWVRQAPGQG |
| | cabiralizumab | LEWMGDINPYNGGTTFNQKFKGRVTITADKSTSTAYMELSSLRSE |
| | VH | DTAVYYCARESPYFSNLYVMDYWGQGTLVTVSS |
| SEQ ID NO: 70 | αhC5F1R | EIVLTQSPATLSLSPGERATLSCKASQSVDYDGDNYMNWYQQKPG |
| | cabiralizumab | QAPRLLIYAASNLESGIPARFSGSGSGTDFTLTISSLEPEDFAVYYC |
| | VL | HLSNEDLSTFGGGTKVEIK |

TABLE 5
Protein sequences for full heavy and light chains.

| Full length | Variable | Constant | Fc |
|---|---|---|---|
| SEQ ID NO: 71 | SEQ ID NO: 44 | SEQ ID NO: 46 | SEQ ID NO: 52 |
| SEQ ID NO: 72 | SEQ ID NO: 45 | SEQ ID NO: 47 | |
| SEQ ID NO: 73 | SEQ ID NO: 48 | SEQ ID NO: 49 | SEQ ID NO: 53 |
| SEQ ID NO: 74 | SEQ ID NO: 50 | SEQ ID NO: 51 | |
| SEQ ID NO: 75 | SEQ ID NO: 54 | SEQ ID NO: 55 | SEQ ID NO: 56 |
| SEQ ID NO: 76 | SEQ ID NO: 57 | SEQ ID NO: 58 | |
| SEQ ID NO: 77 | SEQ ID NO: 59 | SEQ ID NO: 55 | SEQ ID NO: 56 |
| SEQ ID NO: 78 | SEQ ID NO: 60 | SEQ ID NO: 61 | |
| SEQ ID NO: 79 | SEQ ID NO: 62 | SEQ ID NO: 55 | SEQ ID NO: 56 |
| SEQ ID NO: 80 | SEQ ID NO: 63 | SEQ ID NO: 58 | |
| SEQ ID NO: 81 | SEQ ID NO: 64 | SEQ ID NO: 55 | SEQ ID NO: 56 |
| SEQ ID NO: 82 | SEQ ID NO: 65 | SEQ ID NO: 58 | |
| SEQ ID NO: 83 | SEQ ID NO: 66 | SEQ ID NO: 55 | SEQ ID NO: 68 |
| SEQ ID NO: 84 | SEQ ID NO: 67 | SEQ ID NO: 58 | |
| SEQ ID NO: 85 | SEQ ID NO: 69 | SEQ ID NO: 55 | SEQ ID NO: 68 |
| SEQ ID NO: 86 | SEQ ID NO: 70 | SEQ ID NO: 58 | |

TABLE 6
Amino acid sequences of the chains used to construct multispecific molecules.

| SEQ ID | |
|---|---|
| NO | Amino Acid Sequence |
| SEQ ID | QVQLQESGPGLVQPSQTLSLTCTVSGFSLTDFSVHWVRQPPGKGLEWMGRIRSEGNTDYNS |
| NO: 71 | ALKSRLSISRDTSKSQVFLKMNSLQTEDTAIYFCTRGDILGFGYWGQGVMVTVSSAQTTAP |
| | SVYPLAPGCGDTTSSTVTLGCLVKGYFPEPVTVTWNSGALSSDVHTFPAVLQSGLYTLTSS |
| | VTSSTWPSQTVTCNVAHPASSTKVDKKVERRTIKPCPPCKCPAPNLLGGPSVFIFPPKIKDVL |
| | MISLSPIVTCVVVDVSEDDPDVQISWFVNNVEVHTAQTQTHREDYNSTLRVVSALPIQHQD |
| | WMSGKEFKCKVNNKDLPAPIERTISKPKGSVRAPQVYVLPPCEEEMTKKQVTLWCMVTDF |
| | MPEDIYVEWTNNGKIELNYKNIEPVLDSDGSYFMYSKLRVEKKNWVERNSYSCSVVHEG |
| | LHNHHTTKSFSRTPGK |
| SEQ ID | DIVMTQSPLSVSVTPGESASISCRSSKSLLHFKGITFVYWYLQKPGQSPQLLIFRMSSLASGV |
| NO: 72 | PDRFSGSGSETDFTLKISRVEAEDVGTYYCGQLLENPYTFGAGTKLELKRADAAPTVSIFPPS |
| | MEQLTSGGATVVCFVNNFYPRDISVKWKIDGSEQRDGVLDSVTDQDSKDSTYSMSSTLSLT |
| | KVEYERHNLYTCEVVHKTSSSPVVKSFNRNEC |
| SEQ ID | QVQLQQSGAELVKPGSSVKISCKASGYTFTSNFMHWIKQQPGNGLEWIGWIYPGDGDFEY |
| NO: 73 | NQKFNGKATLTADKSSSTAYMQLSSLTSEDSAVYFCAVNYGGYVLDAWGQGASVTVSSA |
| | ETTAPSVYPLAPGTALKSNSMVTLGCLVKGYFPEPVTVTWNSGALSSGVHTFPAVLQSGLY |
| | TLTSSVTVPSSTWSSQAVTCNVAHPASSTKVDKKIVPRECNTIKPCPPCKCPAPNLLGGPSVF |
| | IFPPKIKDVLMISLSPIVTCVVVDVSEDDPDVQISWFVNNVEVHTAQTQTHREDYNSTLRVV |
| | SALPIQHQDWMSGKEFKCKVNNKDLPAPIERTISKPKGSVRAPQVCVLPPPEEEMTKKQVT |
| | LSCAVTDFMPEDIYVEWTNNGKTELNYKNIEPVLDSDGSYFMVSKLRVEKKNWVERNSY |
| | SCSVVHEGLHNHHTTKSFSRTPGK |
| SEQ ID | EIVLTQSPTTMAASPGEKVTITCRASSSTNYMSWYQQKSGASPKPWIYETSKLASGVPDRFS |
| NO: 74 | GSGSGTSYSFTISSMETEDAATYYCHQWSSTPLTFGSGTKLEIKRADAAPTVSIFPPSMEQLT |
| | SGGATVVCFVNNFYPRDISVKWKIDGSEQRDGVLDSVTDQDSKDSTYSMSSTLSLTKVEYE |
| | RHNLYTCEVVHKTSSSPVVKSFNRNEC |
| SEQ ID | EVQLVESGGGLVKPGGSLRLSCAASGFTFSAYAMNWVRQAPGKGLEWVGRIRTKNNNYA |
| NO: 75 | TYYADSVKDRFTISRDDSKNTLYLQMNSLKIEDTAVYYCTTFYGNGVWGQGTLVTVSSAS |
| | TKGPSVFPLAPSSKSTSGGTAALGCLVKDYFPEPVTVSWNSGALTSGVHTFPAVLQSSGLYS |
| | LSSVVTVPSSSLGTQTYICNVNHKPSNTKVDKRVEPKSCDKTHTCPPCPAPELLGGPSVFLFP |
| | PKPKDTLMISRTPEVTCVVVDVSHEDPEVKFNWYVDGVEVHNAKTKPREEQYNSTYRVVS |
| | VLTVLHQDWLNGKEYKCKVSNKALPAPIEKTISKAKGQPREPQVYTLPPCREEMTKNQVSL |
| | WCLVKGFYPSDIAVEWESNGQPENNYKTTPPVLDSDGSFFLYSKLTVDKSRWQQGNVFSC |
| | SVMHEALHNHYTQKSLSLSPGX, wherein X is K or absent |
| SEQ ID | DVVMTQSPLSLPVTLGQPASISCKSSQSLLDSDGKTFLNWFQQRPGQSPRRLIYLVSKLDSG |
| NO: 76 | VPDRFSGSGSGTDFTLKISRVEAEDVGVYYCWQGTHFPYTFGQGTRLEIKRTVAAPSVFIFP |
| | PSDEQLKSGTASVVCLLNNFYPREAKVQWKVDNALQSGNSQESV1EQDSKDSTYSLSSTLT |
| | LSKADYEKHKVYACEVTHQGLSSPVTKSFNRGEC |
| SEQ ID | EVQLVQSGAEVKKPGASVKVSCKASGYTFTGYHMHWVRQAPGQGLEWMGWINPNSGVT |
| NO: 77 | KYAQKFQGRVTMTRDTSINTAYMELSRLRFDDTDVYYCATGGFGYWGEGTLVTVSSAST |
| | KGPSVFPLAPSSKSTSGGTAALGCLVKDYFPEPVTVSWNSGALTSGVHTFPAVLQSSGLYSL |
| | SSVVTVPSSSLGTQTYICNVNHKPSNTKVDKRVEPKSCDKTHTCPPCPAPELLGGPSVFLFPP |
| | KPKDTLMISRTPEVTCVVVDVSHEDPEVKFNWYVDGVEVHNAKTKPREEQYNSTYRVVSV |
| | LTVLHQDWLNGKEYKCKVSNKALPAPIEKTISKAKGQPREPQVYTLPPCREEMTKNQVSL |
| | WCLVKGFYPSDIAVEWESNGQPENNYKTTPPVLDSDGSFFLYSKLTVDKSRWQQGNVFSC |
| | SVMHEALHNHYTQKSLSLSPGX, wherein X is K or absent |
| SEQ ID | LPVLTQPPSVSKGLRQTATLTCTGNSNNVGNQGAAWLQQHQGQPPKLLSYRNHNRPSGVS |
| NO: 78 | ERFSPSRSGDTSSLTITGLQPEDEADYYCLAWDSSLRAFVFGTGTKLTVLGQPKANPTVTLF |
| | PPSSEELQANKATLVCLISDFYPGAVTVAWKADGSPVKAGVETTKPSKQSNNKYAASSYLS |
| | LTPEQWKSHRSYSCQVTHEGSTVEKTVAPTECS |
| SEQ ID | QVQLVQSGAEVKKPGASVKVSCKASGYTFSSYYMHWVRQAPGQGLEWMGIINPSGGNTS |
| NO: 79 | YAQKFQGRVTMTRDTSTSTVYMELSSLRSEDTAVYYCARGGYQLPHGRARAFDMWGQGT |
| | MVTVSSASTKGPSVFPLAPSSKSTSGGTAALGCLVKDYFPEPVTVSWNSGALTSGVHTFPA |
| | VLQSSGLYSLSSVVTVPSSSLGTQTYICNVNHKPSNTKVDKRVEPKSCDKTHTCPPCPAPEL |
| | LGGPSVFLFPPKPKDTLMISRTPEVTCVVVDVSHEDPEVKFNWYVDGVEVHNAKTKPREEQ |
| | YNSTYRVVSVLTVLHQDWLNGKEYKCKVSNKALPAPIEKTISKAKGQPREPQVYTLPPCRE |
| | EMTKNQVSLWCLVKGFYPSDIAVEWESNGQPENNYKTTPPVLDSDGSFFLYSKLTVDKSR |
| | WQQGNVFSCSVMHEALHNHYTQKSLSLSPGX, wherein X is K or absent |
| SEQ ID | AIRMTQSPLSLPVTLGQPASISCTSSQSLVYRDGTTYLNWFQQRPGQSPRRLIYKVSNRDSG |
| NO: 80 | VPDRFTGSGSGTTFTLTISRVEAEDVGIYYCMQGTHWPLTFGQGTKVEIKRTVAAPSVFIFPP |
| | SDEQLKSGTASVVCLLNNFYPREAKVQWKVDNALQSGNSQESVIEQDSKDSTYSLSSTLTL |
| | SKADYEKHKVYACEVTHQGLSSPVTKSFNRGEC |
| SEQ ID | EVQLVESGGGLVQPGGSLRLSCVASGFTFSDYWMSWVRQAPGKGLEWVANIKKDGSVNY |
| NO: 81 | YVDSVKGRFTISRDNAKNSLYLQMNSLRAEDTAVYYCTRFDYWGQGTLVTVSSASTKGPS |
| | VFPLAPSSKSTSGGTAALGCLVKDYFPEPVTVSWNSGALTSGVHTFPAVLQSSGLYSLSSVV |
| | TVPSSSLGTQTYICNVNHKPSNTKVDKRVEPKSCDKTHTCPPCPAPELLGGPSVFLFPPKPK |
| | DTLMISRTPEVTCVVVDVSHEDPEVKFNWYVDGVEVHNAKTKPREEQYNSTYRVVSVLTV |
| | LHQDWLNGKEYKCKVSNKALPAPIEKTISKAKGQPREPQVYTLPPCREEMTKNQVSLWCL |
| | VKGFYPSDIAVEWESNGQPENNYKTTPPVLDSDGSFFLYSKLTVDKSRWQQGNVFSCSVM |
| | HEALHNHYTQKSLSLSPGX, wherein X is K or absent |
| SEQ ID | QAGLTQPPSVSKGLRQTATLTCTGNSNNVGNQGAAWLQQHQGHPPKLLFYRNNNRASGIS |
| NO: 82 | ERLSASRSGNTASLTITGLQPEDEADYYCLTWDSSLSVVVFGGGTKLTVLGQPKANPTVTL |
| | FPPSSEELQANKATLVCLISDFYPGAVTVAWKADGSPVKAGVETTKPSKQSNNKYAASSYL |
| | SLTPEQWKSHRSYSCQVTHEGSTVEKTVAPTECS |
| SEQ ID | QVQLVQSGAEVKKPGASVKVSCKASGYTFTSYDISWVRQAPGQGLEWMGVIWTDGGTNY |
| NO: 83 | AQKLQGRVTMTTDTSTSTAYMELRSLRSDDTAVYYCARDQRLYFDVWGQGTTVTVSSAS |
| | TKGPSVFPLAPSSKSTSGGTAALGCLVKDYFPEPVTVSWNSGALTSGVHTFPAVLQSSGLYS |
| | LSSVVTVPSSSLGTQTYICNVNHKPSNTKVDKRVEPKSCDKTHTCPPCPAPELLGGPSVFLFP |
| | PKPKDTLMISRTPEVTCVVVDVSHEDPEVKFNWYVDGVEVHNAKTKPREEQYNSTYRVVS |
| | VLTVLHQDWLNGKEYKCKVSNKALPAPIEKTISKAKGQPREPQVCTLPPSREEMTKNQVSL |
| | SCAVKGFYPSDIAVEWESNGQPENNYKTTPPVLDSDGSFFLVSKLTVDKSRWQQGNVFSCS |
| | VMHEALHNHYTQKSLSLSPGX, wherein X is K or absent |
| SEQ ID | DIQMTQSPSSLSASVGDRVTITCRASEDVNTYVSWYQQKPGKAPKLLIYAASNRYTGVPSR |
| NO: 84 | FSGSGSGTDFTLTISSLQPEDFATYYCQQSFSYPTFGQGTKLEIKRTVAAPSVFIFPPSDEQLK |
| | SGTASVVCLLNNFYPREAKVQWKVDNALQSGNSQESVTEQDSKDSTYSLSSTLTLSKADY |
| | EKHKVYACEVTHQGLSSPVTKSFNRGEC |
| SEQ ID | QVQLVQSGAEVKKPGSSVKVSCKASGYTFTDNYMIWVRQAPGQGLEWMGDINPYNGGTT |
| NO: 85 | FNQKFKGRVTITADKSTSTAYMELSSLRSEDTAVYYCARESPYFSNLYVMDYWGQGTLVT |
| | VSSASTKGPSVFPLAPSSKSTSGGTAALGCLVKDYFPEPVTVSWNSGALTSGVHTFPAVLQS |
| | SGLYSLSSVVTVPSSSLGTQTYICNVNHKPSNTKVDKRVEPKSCDKTHTCPPCPAPELLGGP |
| | SVFLFPPKPKDTLMISRTPEVTCVVVDVSHEDPEVKFNWYVDGVEVHNAKTKPREEQYNST |
| | YRVVSVLTVLHQDWLNGKEYKCKVSNKALPAPIEKTISKAKGQPREPQVCTLPPSREEMTK |
| | NQVSLSCAVKGFYPSDIAVEWESNGQPENNYKTTPPVLDSDGSFFLVSKLTVDKSRWQQG |
| | NVFSCSVMHEALHNHYTQKSLSLSPGX, wherein X is K or absent |
| SEQ ID | EIVLTQSPATLSLSPGERATLSCKASQSVDYDGDNYMNWYQQKPGQAPRLLIYAASNLESG |
| NO: 86 | IPARFSGSGSGTDFTLTISSLEPEDFAVYYCHLSNEDLSTFGGGTKVEIKRTVAAPSVFIFPPS |
| | DEQLKSGTASVVCLLNNFYPREAKVQWKVDNALQSGNSQESVTEQDSKDSTYSLSSTLTLS |
| | KADYEKHKVYACEVTHQGLSSPVTKSFNRGEC |

TABLE 7
Sequences used to generate aCCR2/aCSFlR multispecific molecules.

| Multispecific | | | | |
|---|---|---|---|---|
| Molecule | Heavy Chain 1 | Light Chain 1 | Heavy Chain 2 | Light Chain 2 |
| 1 | SEQ ID NO: 71 | SEQ ID NO: 72 | SEQ ID NO: 73 | SEQ ID NO: 74 |
| 2 | SEQ ID NO: 75 | SEQ ID NO: 76 | SEQ ID NO: 83 | SEQ ID NO: 84 |
| 3 | SEQ ID NO: 75 | SEQ ID NO: 76 | SEQ ID NO: 85 | SEQ ID NO: 86 |
| 4 | SEQ ID NO: 77 | SEQ ID NO: 78 | SEQ ID NO: 83 | SEQ ID NO: 84 |
| 5 | SEQ ID NO: 77 | SEQ ID NO: 78 | SEQ ID NO: 85 | SEQ ID NO: 86 |
| 6 | SEQ ID NO: 79 | SEQ ID NO: 80 | SEQ ID NO: 83 | SEQ ID NO: 84 |
| 7 | SEQ ID NO: 79 | SEQ ID NO: 80 | SEQ ID NO: 85 | SEQ ID NO: 86 |
| 8 | SEQ ID NO: 81 | SEQ ID NO: 82 | SEQ ID NO: 83 | SEQ ID NO: 84 |
| 9 | SEQ ID NO: 81 | SEQ ID NO: 82 | SEQ ID NO: 85 | SEQ ID NO: 86 |

### Example 2. UniTI-01 Binding to Cells Expressing mCCR2 Alone, mCSF1R Alone, or Both mCCR2 and mCSF1R

[0570] In this and the next few examples, multispecific molecule #1 (also referred to as UniTI-01) shown in Table 7 was characterized. UniTI-01 is an anti-CCR2/anti-CSF1R bispecific antibody. The variable region and full length sequences of UniTI-01 are also provided in Table 11. In a few examples, the bispecific antibody UniTI-01 was compared against an anti-CCR2 bivalent monospecific antibody or an anti-CSF1R bivalent monospecific antibody.

TABLE 11
Sequences of an anti-CCR2/anti-CSF1R bispecific antibody molecule

| SEQ ID | | |
|---|---|---|
| NO | Description | Sequence |
| SEQ ID | αCCR2 MC12 | QVQLQESGPGLVQPSQTLSLTCTVSGFSLTDFSVHWVRQPPGKGLEWMG |
| NO: 44 | VH | RIRSEGNTDYNSALKSRLSISRDTSKSQVFLKMNSLQTEDTAIYFCTRGDI |
| | | LGFGYWGQGVMVTVSS |
| SEQ ID | αCCR2 MC12 | DIVMTQSPLSVSVTPGESASISCRSSKSLLHFKGITFVYWYLQKPGQSPQL |
| NO: 45 | VL | LIFRMSSLASGVPDRFSGSGSETDFTLKISRVEAEDVGTYYCGQLLENPYT |
| | | FGAGTKLELK |
| SEQ ID | Full length | QVQLQESGPGLVQPSQTLSLTCTVSGFSLTDFSVHWVRQPPGKGLEWMG |
| NO: 71 | αCCR2 MC12 | RIRSEGNTDYNSALKSRLSISRDTSKSQVFLKMNSLQTEDTAIYFCTRGDI |
| | heavy chain | LGFGYWGQGVMVTVSSAQTTAPSVYPLAPGCGDTTSSTVTLGCLVKGY |
| | | FPEPVTVTWNSGALSSDVHTFPAVLQSGLYTLTSSVTSSTWPSQTVTCNV |
| | | AHPASSTKVDKKVERRTIKPCPPCKCPAPNLLGGPSVFIFPPKIKDVLMISL |
| | | SPIVTCVVVDVSEDDPDVQISWFVNNVEVHTAQTQTHREDYNSTLRVVS |
| | | ALPIQHQDWMSGKEFKCKVNNKDLPAPIERTISKPKGSVRAPQVYVLPPC |
| | | EEEMTKKQVTLWCMVTDFMPEDIYVEWTNNGKTELNYKNTEPVLDSD |
| | | GSYFMYSKLRVEKKNWVERNSYSCSVVHEGLHNHHTTKSFSRTPGK |
| SEQ ID | Full length | DIVMTQSPLSVSVTPGESASISCRSSKSLLHFKGITFVYWYLQKPGQSPQL |
| NO: 72 | αCCR2 MC12 | LIFRMSSLASGVPDRFSGSGSETDFTLKISRVEAEDVGTYYCGQLLENPYT |
| | light chain | FGAGTKLELKRADAAPTVSIFPPSMEQLTSGGATVVCFVNNFYPRDISVK |
| | | WKIDGSEQRDGVLDSVTDQDSKDSTYSMSSTLSLTKVEYERHNLYTCEV |
| | | VHKTSSSPVVKSFNRNEC |
| SEQ ID | αmCSF1R VH | QVQLQQSGAELVKPGSSVKISCKASGYTFTSNFMHWIKQQPGNGLEWIG |
| NO: 48 | | WIYPGDGDIEYNQKFNGKATLTADKSSSTAYMQLSSLTSEDSAVYFCAV |
| | | NYGGYVLDAWGQGASVTVSS |
| SEQ ID | αmCSF1R VL | EIVLTQSPTTMAASPGEKVTITCRASSSTNYMSWYQQKSGASPKPWIYET |
| NO: 50 | | SKLASGVPDRFSGSGSGTSYSFTISSMETEDAATYYCHQWSSTPLTFGSG |
| | | TKLEIK |
| SEQ ID | Full length | QVQLQQSGAELVKPGSSVKISCKASGYTFTSNFMHWIKQQPGNGLEWIG |
| NO: 73 | αmCSF1R | WIYPGDGDIEYNQKFNGKATLTADKSSSTAYMQLSSLTSEDSAVYFCAV |
| | heavy chain | NYGGYVLDAWGQGASVTVSSAETTAPSVYPLAPGTALKSNSMVTLGCL |
| | | VKGYFPEPVTVTWNSGALSSGVHTFPAVLQSGLYTLTSSVTVPSSTWSSQ |
| | | AVTCNVAHPASSTKVDKKIVPRECNTIKPCPPCKCPAPNLLGGPSVFIFPP |
| | | KIKDVLMISLSPIVTCVVVDVSEDDPDVQISWFVNNVEVHTAQTQTHRED |
| | | YNSTLRVVSALPIQHQDWMSGKEFKCKVNNKDLPAPIERTISKPKGSVRA |
| | | PQVCVLPPPEEEMTKKQVTLSCAVTDFMPEDIYVEWTNNGKTELNYKNT |
| | | EPVLDSDGSYFMVSKLRVEKKNWVERNSYSCSVVHEGLHNHHTTKSFS |
| | | RTPGK |
| SEQ ID | Full length | EIVLTQSPTTMAASPGEKVTITCRASSSTNYMSWYQQKSGASPKPWIYET |
| NO: 74 | αmCSF1R | SKLASGVPDRFSGSGSGTSYSFTISSMETEDAATYYCHQWSSTPLTFGSG |
| | light chain | TKLEIKRADAAPTVSIFPPSMEQLTSGGATVVCFVNNFYPRDISVKWKID |
| | | GSEQRDGVLDSVTDQDSKDSTYSMSSTLSLTKVEYERHNLYTCEVVHKT |
| | | SSSPVVKSFNRNEC |

[0571] ExpiCHO cells were transiently transfected with mouse CCR2, mouse CSF1R, or both mouse CCR2 and CSF1R, according to the manufacturer's instructions. In brief, the transfections were performed with ExpiCHO cells at a cell density of 5.6-6.3×10⁶ cells/mL and at least 95% viability. For each transfection, 25 μg of DNA was diluted with 1 mL of OptiPro SFM (Gibco 12309050) and filtered using spin-X centrifuge tube filters (Corning 8160). A solution of 920 L of OptiPro and 80 μL of expifectamine was added to the filtered DNA, incubated for 1 minute at room temperature, and then added to the cells. On day 1 of the transfection, the cells were enhanced using 150 μL of ExpiCHO enhancer.

[0572] On day 2 of the transfection, the cells were washed with PBS containing 1% BSA (Sigma) and used to set 96-well V-bottom plates (Biotix AP-0350-9CVS) with 100,000 cells/well. UniTI-01 was added to the cells in serial dilutions and incubated for 1 hour at 4° C. The plates were washed twice with PBS containing 1% BSA. The secondary antibody was a 1:500 dilution of goat anti-mouse Fc biotin antibody (Invitrogen Cat. No. 31805), and incubated with the cells for 45 minutes at 4° C. The plates were washed twice with PBS containing 1% BSA. For detection, 1.56×10⁻³ μg of streptavidin-PE (eBioscience Cat. No. 12-4317-87) was used, per well, and incubated for 1 hour at 4° C. The plates were read on a CytoFLEX S (Beckman Coulter). Data were calculated as the median fluorescence intensity of the PE-positive population vs. the median fluorescence intensity of the PE-negative population. The data was normalized for the percent of total median fluorescence intensity.

[0573] Without wishing to be bound by theory, UniTI-01 may preferentially bind cells expressing both CCR2 and CSF1R relative to cells that express either CCR2 or CSF1R. Consistent with the hypothesis that dual target binding increases the avidity of UniTI-01 for the target cell, UniTI-01 exhibited enhanced binding to CCR2 and CSF1R double positive cells, relative to single positive cells (FIG. 1). UniTI-01 showed binding with an EC₅₀ of 15 nM to cells expressing only CCR2. For cells expressing only CSF1R, UniTI-01 had an EC₅₀ of 1 nM. UniTI-01 displayed an EC50 of 400 pM to cells that expressed both CCR2 and CSF1R.

### Example 3. UniTI-01 Inhibits MCP1-Induced Migration of Bone Marrow Derived Monocytes In Vitro

[0574] Mouse bone marrow cells were isolated from femurs of healthy Balb/c mice and differentiated into monocytes in the presence of mCSF1 for four days. Monocyte differentiation was assessed by flow-cytometric analysis of CCR2 and CSF1R expression on hematopoietic cells. The differentiated cells were counted, and cultured with different concentrations of Isotype (mIgG2a), anti-CCR2 and UniTI-01 respectively for 30 minutes at 37° C. Antibody treated cells were subsequently added on the upper chamber in the transwell insert plates, which contained MCP1 (CCL2) in the bottom chamber. MCP1 induced migration was assessed after collecting the media from bottom chamber of transwell plates and cell number enumeration was performed by flow-cytometric analysis.

[0575] The anti-CCR2/anti-CSF1R bispecific antibody UniTI-01 inhibited the MCP1 induced migration of monocytes across the transwell in a dose dependent manner (FIG. 2). At doses 3.7 μM and above, monocyte migration was reduced to the levels observed in the absence of chemokine (FIG. 2). Similar results were obtained with anti-CCR2 antibody treatment, while treatment of cells with IgG2a did not influence migration (FIG. 2).

### Example 4. UniTI-01 Inhibits mCSF-1-Dependent Proliferation of Bone Marrow-Derived Macrophages In Vitro

[0576] Mouse bone marrow cells were isolated from femurs of healthy Balb/c mice and differentiated into monocytes in the presence of mCSF1 for four days. Flow cytometry analysis showed bone marrow cells did not appreciably express CCR2 (FIG. 3A; left panel) at day 0. However, after 4 days of cell culture in the presence of mCSF1, a significant portion of bone marrow cell differentiated into monocytes which displayed CCR2 and CSF1R expression (FIG. 3A; right panel). Monocytes were counted and plated in 96 well plates in the presence of mCSF1. UniTI-01, anti-CSF1R or mIgG2a antibody was added to the cells containing mCSF1. After 72 hours of incubation at 37° C., cell proliferation metabolic activity was assessed by colorimetric reading at OD570 following manufacturer's protocol for the MTT assay kit.

[0577] mCSF1 induced differentiation of monocytes to macrophages, visualized as long fibroblastic cells under the microscope. UniTI-01 and anti-CSF1R antibodies prevented the proliferation of macrophages in the presence of mCSF1 (FIG. 3B).

### Example 5. UniTI-01 does not Inhibit mCSF-1-Dependent Bone Marrow-Derived Monocyte Differentiation In Vitro

[0578] Bone marrow cells were extracted from both femur and tibia of a naive (non-tumor bearing) Balb/c mouse. UniTI-01, anti-CSF1R or mIgG2 antibodies were pre-incubated with freshly isolated bone marrow cells for 30 minutes at 37° C. before the addition of mCSF-1 to allow monocyte differentiation. After 4 days of incubation at 37° C., cells were collected for flow cytometry staining to identify differentiated monocytes. Cells were stained with fluorescent-labeled antibodies for 15 minutes at 4° C. followed by flow cytometry analysis. Monocytes are gated as Live, CD45+, CD11b+, Ly6C+, Ly6G− cells.

[0579] Consistent with the observation that bone marrow precursor cells did not significantly express CCR2 at day 0 (FIG. 3A), the anti-CCR2/anti-CSF1R bispecific antibody UniTI-01 did not inhibit mCSF-1-dependent bone marrow-derived monocyte differentiation in vitro after 4 days of cell culture (FIG. 4). In contrast, the anti-CSF1R bivalent monospecific antibody significantly inhibited mCSF-1-dependent bone marrow-derived monocyte differentiation in vitro (FIG. 4).

### Example 6. UniTI-01 Specifically Binds to Primary Intratumoral M-MDSCs and M2-Like Macrophages In Vitro

[0580] LLC tumors, grown in B6− albino mice, were harvested at a volume of 500-800 mm³ and dissociated using liberase DL+Dnase I for 30 minutes at 37° C., followed by the dissociation program m_imptumor_01 on the GentleMacs. Single cell suspensions were filtered through a 70 μm strainer and total cells were stained with fluorescently labeled antibodies. For this binding study, 100 μg of UniTI-01 was labeled using the Alexa Fluor 647 Antibody Labeling Kit (ThermoFisher Scientific), the concentration of labeled antibody was determined by Nanodrop, and the indicated serial dilutions (5 uM, 1 uM, 0.1 uM, 0.01 uM) were made in Facs buffer. M-MDSCs were gated by live CD45+CD11b+Ly6ChighLy6G−, M2 macrophages were gated by live CD45+CD11b+F4/80+CD206+, CD3+ T cells were gated by live CD45+CD3+, and neutrophils were gated by live CD45+CD11b+Ly6G+. The cells were stained for 15 minutes on ice in the dark, stained with zombie violet for viability, and immediately acquired on the cytometer.

[0581] Concentration-dependent binding of UniTI-01 to M2 macrophages and M-MDSCs is shown in FIG. 5.

### Example 7. UniTI-01 Depletes Suppressive Myeloid Cells in Several Mouse Models In Vivo

[0582] Mice were injected either with MC38 colon cancer cell line (B6 albino mice) or EMT6 breast cancer cell line (BALB/c mice) and once tumors reached a volume of 150-200 mm³, the same mice were randomized and grouped into two arms. One arm received a treatment of 20 mg/kg UniTI-01 via ip route at a dose of 20 mg/kg on day 1, 4, 7 and 10 and the other received PBS (vehicle) at the same schedule. Twenty-four hours after the 4^{th} dose, tumors were harvested for flow cytometry analysis. Tumors were minced into ˜2 mm pieces and dissociated with liberase+dnase I for 30 minutes at 37° C., followed by using a 1 minute tumor blend program on the gentleMACs. Single cell suspensions were made by filtering through a 70 μM filter and counted. Cells were then stained for flow cytometry analysis. TAMs were gated by live CD45+CD11b+Ly6G−Ly6C-F4/80+ and M-MDSCs were gated by live CD45+CD11b+Ly6G−Ly6C^{high}. Each point represents a single mouse. Error bars represent the mean and standard error between individual mice. Statistics were calculated using Student's t test.

[0583] Consistent with the binding to M2 macrophages and M-MDSCs observed in Example 6, the anti-CCR2/anti-CSF1R bispecific antibody UniTI-01 reduced TAMs and M-MDSCs in both EMT6 and MC38 syngeneic tumor models (FIG. 6).

### Example 8. UniTI-01 Depletes Tumor-Associated Macrophages but Spares Healthy Tissue Macrophages

[0584] Balb/c mice were injected with EMT6 syngeneic breast cell line and once tumors reached a volume of 150-200 mm³, were randomized and grouped into three arms. One arm received a treatment of 20 mg/kg UniTI-01 via ip route at a dose of 20 mg/kg, the second arm received a treatment of 10 mg/kg anti-CSF1R antibody and the third arm received PBS on day 1, 4, 7 and 10. Twenty-four hours after the 4^{th} dose, mice were sacrificed and tumors and livers were harvested and formalin fixed and paraffin embedded. To detect the macrophage populations in liver and tumors, tissue sections were immunohistochemically stained with F4/80 antibody (Cell Signaling) and detected by Envision system. Approximately 10 regions of interest per tumor or liver section were analyzed by ImageJ software.

[0585] Without wishing to be bound by theory, UniTI-01 may preferentially bind to cells expressing both CCR2 and CSF1R relative to cells expressing either CCR2 or CSF1R, and may have less an effect on tissue-resident macrophages, such as the liver-resident Kupffer cells, which do not express CCR2, relative to tumor-associated macrophages which express both CCR2 and CSF1R.

[0586] Consistent with the data described earlier (FIG. 6), the anti-CCR2/anti-CSF1R bispecific antibody UniTI-01 markedly depleted tumor-associated macrophages (FIGS. 7A and 7C). In contrast, UniTI-01 did not appreciably deplete tissue-resident macrophages in the liver (FIGS. 7B and 7D), whereas the anti-CSF1R bivalent monospecific antibody significantly reduced macrophages in both compartments (FIGS. 7A-7D).

[0587] Additional data show that compared with the anti-CSF1R bivalent monospecific antibody, UniTI-01 also spares healthy tissue macrophages in small intestine (FIGS. 7E and 7F) and kidney (FIGS. 7G and 7H).

### Example 9. UniTI-01 does not Inhibit CSF-1 Dependent Cell Survival in CCR2-Negative NFS-60 Cells In Vitro

[0588] CCR2-negative, CSF1R-positive NFS-60 cells were cultured in phenol-red-free media in the presence of UniTI-01, a monovalent monospecific anti-CSF1R antibody, a bivalent monospecific anti-CSF1R antibody, or a mIgG2 antibody for 30 minutes at 37° C. followed by the addition of mCSF-1 for cell survival. After 48 hours of incubation at 37° C., cell viability metabolic activity was assessed by colorimetric reading at OD570 following manufacturer's protocol for the MTT assay kit.

[0589] As shown in FIG. 8A, the anti-CSF1R bivalent monospecific antibody (αCSF1R) markedly reduced viability of NFS-60 cells at high antibody concentrations. In contrast, the anti-CCR2/anti-CSF1R bispecific antibody UniTI-01 or the monovalent monospecific anti-CSF1R antibody (mono-αCSF1R) did not inhibit CSF-1 dependent cell survival in CCR2-negative NFS-60 cells in vitro (FIG. 8A). Without wishing to be bound by theory, this data suggests that the anti-CCR2/anti-CSF1R bispecific antibody UniTI-01 may be less likely to inhibit CCR2-negative, CSF1R-positive cells, compared with an anti-CSF1R bivalent monospecific antibody, which is consistent with the results described in FIGS. 7B and 7D. To confirm NFS-60 did not express CCR2, cells were washed with BSA containing PBS buffer and fluorescent-labeled antibodies for CSF1R and CCR2 for 20 minutes at 4° C. followed by flow cytometry analysis. As shown in FIG. 8B, NFS-60 expressed CSF1R but not CCR2.

### Example 10. UniTI-01 Promotes CD8+ T Cell Infiltration in EMT6 Tumors In Vivo

[0590] Balb/c mice were injected with EMT6 syngeneic breast cell line and once tumors reached a volume of 150-200 mm³, were randomized and grouped into three arms. One arm received a treatment of 20 mg/kg UniTI-01 via ip route at a dose of 20 mg/kg, the second arm received a treatment of 10 mg/kg anti-PDL1 and the third arm received PBS on day 1, 4, 7 and 10. Twenty-four hours after the 4^{th} dose, mice were sacrificed and tumors were harvested for flow cytometry analysis. Tumors were minced into ˜2 mm pieces and dissociated with liberase+dnase I for 30 minutes at 37° C., followed by using a 1 minute tumor blend program on the gentleMACS. Single cell suspensions were made by filtering through a 70 μM filter and counted. Cells were then stained for flow cytometry analysis. CD8 T cells were gated by staining on live CD8 cells that expressed CD45 and CD3. Each point represents a single mouse tumor. Error bars represent the mean and standard error between individual mice. Statistics were calculated using one way ANOVA analysis.

[0591] The anti-CCR2/anti-CSF1R bispecific antibody UniTI-01 significantly increased CD8+ T cell infiltration in EMT6 tumors in vivo (FIG. 9).

### Example 11. UniTI-01 Reduces Treg Frequency and Increases CD8 T Cells/Treg Ratio in EMT6 Tumors In Vivo

[0592] B6 albino mice were injected with MC38 syngeneic colon cell line and once tumors reached a volume of 150-200 mm³, were randomized and grouped into three arms. One arm 10 received a treatment of 20 mg/kg UniTI-01 via ip route at a dose of 20 mg/kg, the second arm received a treatment of 10 mg/kg anti-PDL1 and the third arm received PBS on day 1, 4, 7 and 10. Twenty-four hours after the 4^{th} dose, mice were sacrificed and tumors were harvested for immune profiling by Flow cytometry. Tumors were minced into ˜2 mm pieces and dissociated with liberase+dnase I for 30 minutes at 37° C., followed by using a 1 minute tumor blend program on the gentleMACs. Single cell suspensions were made by filtering through a 70 μM filter and counted. Cells were then stained for flow cytometry analysis. T regulatory cells were analyzed by gating on live CD4+ Foxp3+ T cells. In addition, CD8 T cells were gated by staining on live CD8 cells that expressed CD45 and CD3. Each point represents a single mouse tumor. Error bars represent the mean and standard error between individual mice. Statistics were calculated using one way ANOVA analysis.

[0593] Treatment with UniTI-01 led to a greater reduction in Treg frequency and a greater increase in the CD8+ T cell/Treg ratio in the tumor, compared with treatment with the anti-PDL1 antibody (FIGS. 10A and 10B).

### Example 12. UniTI-01 Shows Antitumor Efficacy, Tumor Regressions and Enhanced Survival when Used in Combination with Anti-PDL1 Antibody

[0594] Tumor growth inhibition of UniTI-01 in combination with anti-PDL1 antibody was tested in a subcutaneous mouse syngeneic EMT6 breast cancer model. ˜8 week old female BALB/c (Jackson Labs) were acclimatized for 3 days prior to start of the studies. Mice were housed 5 animals per cage, and the disposable cages were placed in Innovive IVC mouse racks. EMT6 cells previously tested to be free from mouse pathogens (mouse CLEAR panel, Charles River Labs) were implanted subcutaneously on day 0 at a density of 0.5×10⁶ cells in the right flanks of BALB/c mice. Tumors were measured and recorded in two dimensions twice weekly using a digital caliper. Tumor volumes (mm³) were calculated using the formula width×width×length×0.52. Following tumor volume measurements on day 7 post implantation, mice were randomized and grouped into four arms according to a mean tumor volume of 77 mm³. One arm was treated with PBS, the second arm was treated with anti-PDL1 antibody at a dose of 10 mg/kg, the third arm treated with UniTI-01 at a dose of 20 mg/kg, and the fourth arm treated with a combination of anti-PDL1 antibody and UniTI-01. All treatments were via ip route and the schedules were twice weekly for up to four weeks of dosing. All the agents were formulated freshly in PBS prior to dosing. Tumor volume measurements continued up to 80 days. Tumor volume data is plotted as Mean±SEM. In addition, survival is recorded based on the time to reach the study endpoint of a TV of 2000 mm³ and plotted as a Kaplan Meier curve. Statistics were determined by Log− rank test and p− values are plotted.

[0595] As shown in FIGS. 11A and 11B, treatment with UniTI-01 improved the survival of tumor-bearing animals. Combining UniTI-01 and an anti-PDL1 antibody further improved the antitumor efficacy, tumor regressions and survival in vivo (FIGS. 11A and 11B).

[0596] In a separate study using a MC38 colon mouse model, UniTI-01 shows superior anti-PDL1 combination benefit over anti-CSF1R antibody (FIG. 11C).

### Example 13. UniTI-01 Spares Osteoclasts when Compared to Anti-CSF1R Treatment

[0597] The next study relates to in vitro differentiation of osteoclasts from murine bone marrow cells with M-CSF and RANKL for 6 days, followed by fixation and TRAP staining. As shown in FIG. 14, UniTI-01 spares osteoclasts when compared with an anti-CSF1R bivalent monospecific antibody.

### Example 14. UniTI-01 Drives Depletion of M-MDSC and TAMs in Tumors

[0598] In this study, mice bearing EMT6, MC38, or LLC1 tumors received an anti-PDL1 bivalent monospecific antibody, an anti-CSF1R bivalent monospecific antibody, an anti-CCR2 bivalent monospecific antibody, or UniTI-01. The amount of M-MDSCs (FIG. 15A) or TAMs (FIG. 15B) per mg tumor was measured using flow cytometry analysis. As shown in FIGS. 15A and 15B, UniTI-01 drives depletion of M-MDSC and TAMs in EMT6, MC38, and LLC1 tumors.

### Example 15. UniTI-01 Preferentially Binds to Macrophages within Tumor Rather than Healthy Tissues

[0599] In this study, mice bearing LLC1 tumors received UniTI-01 treatment. 24 hours post UniTI-01 treatment, tissues from tumor, gut, kidney, spleen, or liver were analyzed by immunohistochemistry using an anti-rat IgG antibody (for detecting UniTI-01) and an anti-F4/80 antibody (for detecting macrophages and monocytes). As shown in FIG. 16, UniTI-01 administered to tumor bearing mice preferentially binds to macrophages within tumor. There was no detectable anti-rat IgG antibody staining in gut, kidney, liver, or spleen despite abundant F4/80+ cells.

### Example 16. Biodistribution of UniTI-01 in EMT6 Tumor Implanted Mice

[0600] VivoTag 800 Fluorochrome labeled UniTI-01 was administered in EMT6 tumor implanted mice and detected by fluorescence imaging (signal normalized to untreated organ fluorescence). The biodistribution of UniTI-01 6-hour, 24-hour, or 72-hour after administration is shown in FIG. 17.

### Example 17. CSF-1R and CCR2 Expression on M-MDSC Cells in Ovarian Cancer Patients

[0601] Tumor tissues were extracted from four ovarian tumor patients and analyzed for CSF1R and CCR2 expression. As shown in FIG. 18, tumor M-MDSCs show co-staining of CSF1R and CCR2, whereas tumor G-MDSCs do not. CSF-1R and CCR2 co-expression was also detected on CD163+ TAMs (data not shown).

### Example 18. UniTI-01 Increases T Cell Infiltration in Tumors

[0602] In this study, mice bearing EMT6 tumors received an anti-CSF1R bivalent monospecific antibody, an anti-CCR2 bivalent monospecific antibody, or UniTI-01. Tumor tissues were stained using an anti-CD3 antibody and % CD3 positive area was quantified. As shown in FIGS. 19A and 19B, compared with the anti-CSF1R bivalent monospecific antibody, UniTI-01 increases T cell infiltration in EMT6 tumors.

[0603] Additional immunohistochemistry analyses reveal that UniTI-01 increases CD8+ T cell/Treg ratio in EMT6, MC38 and LLC1 tumors (FIG. 20).

### Example 19. Additional In Vivo Studies Testing UniTI-01 in Combination with Anti-PDL1 Antibody

[0604] A number of in vivo studies were conducted to analyze the effect of UniTI-01 used in combination with an anti-PDL1 antibody. Compared with using the anti-PDL1 antibody as a single agent, combining UniTI-01 and the anti-PDL1 antibody reduces the amount of monocytic myeloid-derived suppressor cells and tumor-associated macrophages (FIG. 22A).

[0605] UniTI-01 and anti-PDL1 combination therapy shows not only durable anti-tumor responses (FIG. 23 left panel), but also development of immune memory against the original tumor (FIG. 23, right panel).

[0606] UniTI-01 shows single-agent efficacy in the MC38 syngeneic mouse model (FIG. 24A), whereas mice bearing CT26 or EMT6 tumors benefit from a combination therapy of UniTI-01 and anti-PDL1 antibody (FIGS. 24B and 24C). Without wishing to be bound by theory, the different anti-tumor activities of UniTI-01 in different tumor models may be, at least partially, due to the amount of intra-tumoral M-MDSC content. The intra-tumoral M-MDSC content as a percent of immune infiltrate for MC38 model, CT26 model, and EMT6 mole was around 30%, 10%, and 10%, respectively.

### Example 20. Characterization of UniTI-102

[0607] UniTI-01 was modified by fusing a human TGFβ R2/R2 dimer to the C-terminus of the heavy chains (FIG. 12B and FIG. 26A). This modified construct is named UniTI-102. First, the ability of UniTI-102 to neutralize TGFβ was tested. As shown in FIG. 26B, UniTI-102 effectively neutralizes TGFβ/Smad activation, whereas UniTI-01 does not.

[0608] Next, mice implanted with EMT6 syngeneic tumor were administered with UniTI-01, UniTI-102, anti-PDL1, or a combination of UniTI-102 and anti-PDL1. As shown in FIGS. 27A, 27B, and 27C, UniTI-102 shows strong monotherapy response in EMT6 tumor model and is not enhanced with the addition of anti-PD-L1 under the condition tested.

### Example 21. Purification of Anti-CSF1R Half-Arm Fabs

[0609] Two human anti-human CSF1R antibodies B1117 and BI123 were optimized using yeast display. The antibody BI117 comprises a heavy chain variable region (VH) comprising the amino acid sequence of SEQ ID NO: 323 and a light chain variable region (VL) comprising the amino acid sequence of SEQ ID NO: 341, as disclosed in Table 15. The antibody BI123 comprises a VH comprising the amino acid sequence of SEQ ID NO: 337 and a VL comprising the amino acid sequence of SEQ ID NO: 342, as disclosed in Table 15. Affinity maturation using yeast display introduced modifications into the HCDR2 and HCDR3 of BI117, generating variants of the VH of BI117 (SEQ ID NOs: 324-336 shown in Table 15). Similarly, the HCDR2 and HCDR3 of BI123 were also mutated, leading to variants of the VH of BI123 (SEQ ID NOs: 338-340 shown in Table 15).

[0610] To analyze these affinity matured variants, half-arm antibodies BIM0542, BIM0543, BIM0544 BIM0545, BIM0546, BIM0547, BIM0548, BIM0549, BIM0550, BIM0551, BIM0552, BIM0553, BIM0554, BIM0555, BIM0556, BIM0566, and BIM0567 were expressed. The full-length sequence information of these antibodies is disclosed in Table 28. Briefly, all of these so-called half-arm antibodies comprise three chains: a heavy chain comprising a VH fused to a CH1 and an Fc comprising a hole (designated as HC 2 in Table 28), a cognate light chain (designated as LC 2 in Table 28), and a truncated his-tagged Fc domain comprising a knob (designated as HC 1 in Table 28). The VH/VL pairs contained in these half-arm antibodies are disclosed in Table 30.

TABLE 30
VH/VL pairs in half-arm antibodies.

| BIM ID | VH | VH SEQ ID NO | VL | VL SEQ ID NO |
|---|---|---|---|---|
| BIM0542 | aCSF1R BI117 | SEQ ID NO: 324 | aCSF1R BI117 | SEQ ID NO: 341 |
| | C5-R2A VH | | VL | |
| BIM0543 | aCSF1R BI117 | SEQ ID NO: 325 | aCSF1R BI117 | SEQ ID NO: 341 |
| | C9-R2A VH | | VL | |
| BIM0544 | aCSF1R BI117 | SEQ ID NO: 326 | aCSF1R BI117 | SEQ ID NO: 341 |
| | D1-R2A VH | | VL | |
| BIM0545 | aCSF1R BI117 | SEQ ID NO: 327 | aCSF1R BI117 | SEQ ID NO: 341 |
| | E2-R2B VH | | VL | |
| BIM0546 | aCSF1R BI117 | SEQ ID NO: 328 | aCSF1R BI117 | SEQ ID NO: 341 |
| | G1-R2B VH | | VL | |
| BIM0547 | aCSF1R BI117 | SEQ ID NO: 329 | aCSF1R BI117 | SEQ ID NO: 341 |
| | G12-R2B VH | | VL | |
| BIM0548 | aCSF1R BI117 | SEQ ID NO: 330 | aCSF1R BI117 | SEQ ID NO: 341 |
| | D6-R3B VH | | VL | |
| BIM0549 | aCSF1R BI117 | SEQ ID NO: 331 | aCSF1R BI117 | SEQ ID NO: 341 |
| | A6-R3B VH | | VL | |
| BIM0550 | aCSF1R BI117 | SEQ ID NO: 332 | aCSF1R BI117 | SEQ ID NO: 341 |
| | A11-R3B VH | | VL | |
| BIM0551 | aCSF1R BI117 | SEQ ID NO: 333 | aCSF1R BI117 | SEQ ID NO: 341 |
| | B2-R3B VH | | VL | |
| BIM0552 | aCSF1R BI117 | SEQ ID NO: 323 | aCSF1R BI117 | SEQ ID NO: 341 |
| | VH | | VL | |
| BIM0553 | aCSF1R BI117 | SEQ ID NO: 334 | aCSF1R BI117 | SEQ ID NO: 341 |
| | C5-R3B VH | | VL | |
| BIM0554 | aCSF1R BI123 | SEQ ID NO: 338 | aCSF1R BI123 | SEQ ID NO: 342 |
| | A5-R3B VH | | VL | |
| BIM0555 | aCSF1R BI123 | SEQ ID NO: 339 | aCSF1R BI123 | SEQ ID NO: 342 |
| | B6-R3B VH | | VL | |
| BIM0556 | aCSF1R BI123 | SEQ ID NO: 340 | aCSF1R BI123 | SEQ ID NO: 342 |
| | C1-R3B VH | | VL | |
| BIM0566 | aCSF1R BI117 | SEQ ID NO: 335 | aCSF1R BI117 | SEQ ID NO: 341 |
| | C6-R3B VH | | VL | |
| BIM0567 | aCSF1R BI117 | SEQ ID NO: 336 | aCSF1R BI117 | SEQ ID NO: 341 |
| | D11-R3B VH | | VL | |

[0611] Proteins were expressed in ExpiCHO system (GE lift tech) according to the manufacturer's instructions. Briefly, DNA encoding for sequences as outlined in Table 28 was mixed equally and used to transfected ExpiCHO cells. 5 days after transfection, the cells were measured for density and viability. The cells were transferred to 50 mL conical vials and centrifuged for 20 minutes at 18,000×g. Each supernatant was filtered through a 0.22 μm membrane. 2.0 mL of equilibrated Protein A resin was added to each construct. The mixture was incubated for 2 hours at room temperature before loaded into a 1.5 cm column. The resin was washed with 3×10 CV of PBS. The protein was eluted in 5 CV of Protein A elution buffer (20 mM citrate, 100 mM sodium chloride, pH 2.76) and collected in a single 10.0 mL fraction for each sample. Each sample was neutralized to pH 6.5 with 1M sodium citrate.

[0612] The protein content of the elution fraction was estimated using absorbance at 280 nm with the nanodrop. 1.0 mL of equilibrated Ni IMAC resin was added to each construct. The mixture was incubated for 2 hours at room temperature before loaded into a 1.5 cm column. The resin was washed with 3×10 CV of 50 mM Tris-HCl, 150 mM sodium chloride, pH 7.5. The protein was eluted in 5 CV of Ni IMAC elution buffer (50 mM Tris-HCl, 150 mM sodium chloride, 500 mM Imidazole, pH 7.5) and collected in a single 5.0 mL fraction. Each elution fraction was buffer exchanged into 20 mM citrate, 100 mM sodium chloride, pH 5.5 using PD-10 desalting columns. A gel (in MES buffer) of the load & flow-through (2 μL), elution and reduced elution fractions (5 μg) from the Protein A column was run to assess purity. The protein content of the elution fraction was estimated using absorbance at 280 nm with the nanodrop.

[0613] SDS-gel of the final purified antibodies is shown in FIG. 28 and yields are shown Table 31. In Table 31, the “mg/mL” column shows concentrations of the final purified samples, and the “mg/L” column shows an estimate of expression level per liter based on the culture volume (50 ml) used for the pilot experiment extrapolated to 1 L.

TABLE 31
final yield of affinity matured anti-human
CSF1R antibodies after purification

| Construct | A280 of 1 mg/mL | A280 | mg/mL | mL | mg | mg/L |
|---|---|---|---|---|---|---|
| BIM0542 | 1.47 | 0.70 | 0.48 | 7.0 | 3.36 | 67 |
| BIM0543 | 1.45 | 0.79 | 0.54 | 7.0 | 3.78 | 75 |
| BIM0544 | 1.47 | 0.77 | 0.52 | 7.0 | 3.64 | 72 |
| BIM0545 | 1.47 | 0.64 | 0.44 | 7.0 | 3.08 | 61 |
| BIM0546 | 1.45 | 0.74 | 0.51 | 7.0 | 3.57 | 71 |
| BIM0547 | 1.47 | 0.67 | 0.46 | 7.0 | 3.22 | 64 |
| BIM0548 | 1.47 | 0.77 | 0.52 | 7.0 | 3.64 | 72 |
| BIM0549 | 1.47 | 0.65 | 0.44 | 7.0 | 3.08 | 61 |
| BIM0550 | 1.47 | 0.64 | 0.44 | 7.0 | 3.08 | 61 |
| BIM0551 | 1.45 | 0.71 | 0.49 | 7.0 | 3.43 | 68 |
| BIM0552 | 1.47 | 0.54 | 0.37 | 7.0 | 2.59 | 51 |
| BIM0553 | 1.45 | 0.76 | 0.52 | 7.0 | 3.64 | 72 |
| BIM0554 | 1.58 | 0.40 | 0.25 | 7.0 | 1.75 | 35 |
| BIM0555 | 1.55 | 0.54 | 0.35 | 7.0 | 2.45 | 49 |
| BIM0556 | 1.53 | 0.69 | 0.45 | 7.0 | 3.15 | 63 |
| BIM0566 | 1.47 | 0.90 | 0.61 | 3.5 | 2.15 | 43 |
| BIM0567 | 1.47 | 1.38 | 0.94 | 3.5 | 3.29 | 65 |

### Example 22: ELISA Binding of Purified Anti-CSF1R Antibodies

[0614] Microplates were separately coated with 2 μg/mL of human or cyno CSF1R in 100 μL and blocked with 2% BSA. Serial dilutions of unlabeled monovalent human antibodies (11 points, 3-fold dilutions, 400 nM to 6.8 μM) were transferred to the coated and blocked plates at 75 μL/well and incubated for 1 hr at room temperature. Plates were washed three times and incubated for 30 mins with anti-human Fc horseradish peroxidase conjugate followed by addition of TMB, a substrate of HRP. The plates were developed for 5 mins, stopped with 1M HCL and read at a wavelength of 450 nm.

[0615] The BI117 and BI123 variants purified in Example 21 all showed binding to human CSF1R (FIG. 29A). The binding to cyno CSF1R varied between different constructs (FIG. 29B).

### Example 23: Functional Activity of Purified Anti-Human CSF1R Antibodies

[0616] Untouched CD14 positive human monocytes were purified using magnetic bead separation from negative selection of freshly isolated PBMCs. Monocytes were cultured at 37° C. in a 96-well plate in the presence of anti-CSF1R blocking antibodies and hCSF-1 for 24 hours. Cell culture supernatants were harvested for measuring CCL2 (MCP-1) secretion. Monocytes alone served as minimal MCP-1 secretion. Monocytes in the presence of hCSF-1 served as maximum MCP-1 secretion. MCP-1 was measured using electrochemiluminescence (Mesoscale Discovery).

[0617] As shown in FIG. 30, the presence of monovalent CSF1R blocking antibodies led to concentration-dependent reduction of MCP-1. Anti-CSF1R monovalent constructs BIM0542, BIM0543, BIM0544, BIM0545, BIM0546, BIM0547, BIM0549, BIM0550, BIM0551, BIM0552, BIM0553, BIM0555, BIM0556, BIM0567 showed IC50s in the range of 0.045-0.9 nM (FIG. 30). BIM0548 and BIM0554 showed IC50s up to 30 nM (FIG. 30).

### Example 24: Cell Binding of Purified Anti-CSF1R Antibodies

[0618] HEK-293T cells were lentivirally transduced with human CSF1R and stable cell lines were generated. Nearly all transduced cells expressed high levels of CSF1R. Cells were washed with PBS containing 0.5% BSA and 0.1% sodium azide (staining buffer) and added to 96-well V-bottom plates with 100,000 cells/well. Human anti-CSF1R monovalent antibodies were added to the cells in 2.5 fold serial dilutions and incubated for 2 hour at room temperature. The plates were washed twice with staining buffer. The secondary antibody against human Fc conjugated to APC was added at 1:200 dilution (1.5 mg/ml stock) and incubated with the cells for 1 hour at 4° C. followed by washing with staining buffer. Cells were subsequently stained with a live/dead dye to exclude any dying cells and were fixed for 10 minutes with 4% paraformaldehyde at room temperature. The plates were read on CytoFLEX LS (Beckman Coulter). Data was calculated as the percent-APC positive population.

[0619] As shown in FIG. 31, all the anti-CSF1R monovalent antibodies tested showed binding the cells expressing human CSF1R.

### Example 25: Expression and Purification of Selected Bispecific CCR2×CSF1R Kappa/Lambda Antibodies

[0620] Anti-CCR2/anti-CSF1R (“CCR2×CSF1R”) bispecific antibodies BIM0204, BIM0205, BIM0206, BIM0207, BIM0208, BIM0209, BIM0210, and BIM0211 were generated as described below. The full-length sequence information of these antibodies is disclosed in Table 28. Briefly, these antibodies comprise an anti-CCR2 arm (designated as HCl and LC 1 in Table 28) and an anti-CSF1R arm (designated as HC 2 and LC 2 in Table 28). The VH/VL pairs contained in these bispecific antibodies are summarized in Table 32. The anti-CCR2 binding arm comprises a kappa light chain whereas the anti-CSF1R binding arm comprises a lambda light chain.

TABLE 32
VH/VL pairs in bispecific antibodies.

| | Anti-CCR2 arm | | | | Anti-CSF1R arm | | | |
|---|---|---|---|---|---|---|---|---|
| | | VH SEQ | | VL SEQ | | VH SEQ | | VL SEQ |
| BIM ID | VH | ID NO | VL | ID NO | VH | ID NO | VL | ID NO |
| BIM0204 | aCCR2 | SEQ ID | aCCR2 | SEQ ID | aCSF1R | SEQ ID | aCSF1R | SEQ ID |
| | Hum1 VH | NO: 343 | VL | NO: 345 | BI117 VH | NO: 323 | BI117 VL | NO: 341 |
| BIM0205 | aCCR2 | SEQ ID | aCCR2 | SEQ ID | aCSF1R | SEQ ID | aCSF1R | SEQ ID |
| | Hum1 VH | NO: 343 | VL | NO: 345 | BI123 VH | NO: 337 | BI123 VL | NO: 342 |
| BIM0206 | aCCR2 | SEQ ID | aCCR2 | SEQ ID | aCSF1R | SEQ ID | aCSF1R | SEQ ID |
| | Hum2 VH | NO: 344 | VL | NO: 345 | BI117 VH | NO: 323 | BI117 VL | NO: 341 |
| BIM0207 | aCCR2 | SEQ ID | aCCR2 | SEQ ID | aCSF1R | SEQ ID | aCSF1R | SEQ ID |
| | Hum2 VH | NO: 344 | VL | NO: 345 | BI123 VH | NO: 337 | BI123 VL | NO: 342 |
| BIM0208 | aCCR2 | SEQ ID | aCCR2 | SEQ ID | aCSF1R | SEQ ID | aCSF1R | SEQ ID |
| | Hum1 VH | NO: 343 | VL | NO: 345 | BI117 VH | NO: 323 | BI123 VL | NO: 342 |
| BIM0209 | aCCR2 | SEQ ID | aCCR2 | SEQ ID | aCSF1R | SEQ ID | aCSF1R | SEQ ID |
| | Hum1 VH | NO: 343 | VL | NO: 345 | BI123 VH | NO: 337 | BI117 VL | NO: 341 |
| BIM0210 | aCCR2 | SEQ ID | aCCR2 | SEQ ID | aCSF1R | SEQ ID | aCSF1R | SEQ ID |
| | Hum2 VH | NO: 344 | VL | NO: 345 | BI117 VH | NO: 323 | BI123 VL | NO: 342 |
| BIM0211 | aCCR2 | SEQ ID | aCCR2 | SEQ ID | aCSF1R | SEQ ID | aCSF1R | SEQ ID |
| | Hum2 VH | NO: 344 | VL | NO: 345 | BI123 VH | NO: 337 | BI117 VL | NO: 341 |

[0621] Prior to transfection, CHO cells (3E7 at a viability of >99%) were seeded at a density of ˜2×10⁶ cells/mL into 8×2L Erlenmeyer shake flasks containing 450 mL of CD Forti CHO and 2 mM L-glutamine. Co-transfection of all 4 chains was conducted. DNA-PEI mixture was added to each flask. Flasks were swirled and incubated at 37° C. with 5% CO₂ and 130 rpm. Temperature was shifted to 32° C. on day 2. 10% feed C, 2 mM L-glutamine, and 2 g/L glucose were added on day 2 and day 5 and 0.5 mM Sodium butyrate was added on day 5. 150 mL of fresh media, 5% feed C, 2 mM L-glutamine, and 2 g/L glucose was added to the batch on day 7 and the cells were harvested on day 9.

[0622] 500-600 ml of the culture supernatant was incubated with 2 ml of MabSelectSure resin for ˜16 h at 4° C. on a rocking platform. The resin was collected and washed with 1×PBS. Protein was eluted using 30 mM Sodium Acetate pH 3.6, 100 mM NaCl in 4 fractions of 2 ml each. 10 μL of the fractions were checked on reduced or non-reduced SDS-PAGE. The fractions were pooled and pH adjusted to ˜pH 5.0 and concentration estimated using UV absorbance. SDS-PAGE of the final purified bispecific CCR2×CSF1R antibodies is shown in FIG. 32 and the final yield is shown in Table 33.

TABLE 33
Final yield of purified CCR2 x CSF1R
bispecific kappa/lambda antibodies

| Protein Name | Protein concentration mg/mL | Volume (mL) |
|---|---|---|
| BIM0204 | 5.1 | 8 |
| BIM0205 | 7.1 | 8 |
| BIM0206 | 5.4 | 8 |
| BIM0207 | 6.12 | 8 |
| BIM0208 | 5.8 | 8 |
| BIM0209 | 5.7 | 8 |
| BIM0210 | 7.4 | 8 |
| BIM0211 | 5.1 | 8 |

### Example 26: Functional Activity of Bispecific CCR2×CSF1R Antibodies

[0623] Tango-CCR2 bla2 U2OS cells (Invitrogen) express human CCR2, which in response to the ligand, CCL2, emit blue signal driven by beta-lactamase reporter gene (at 460 nm). The reporter cells were cultured in a 96-well plate in the presence of CCL2 for 16 hours at 37° C. before the addition of BLA substrate. In the absence of CCL2, the addition of substrate leads to green emission (at ˜530 nm).

[0624] The presence of anti-CCR2 blocking antibodies led to concentration-dependent reduction in the emission at 460 nm (over 530 nM) (FIG. 33). The bivalent anti-CCR2 antibody positive controls, BHM1662 and BHM0139, showed IC50 at 19.1 nM and 8.5 nM, respectively. The human IgG1 showed no CCR2-dependent signal inhibition. Bispecific antibody constructs BIM0206, BHI0207, BIM0210 and BIM0211 showed IC50 in the range of 59-82 nM while IC50 of BIM0204, BIM0205, BIM0208 and BIM0209 ranged from 150-650 nM (FIG. 33).

[0625] Untouched CD14 positive human monocytes were purified using magnetic bead separation from negative selection of freshly isolated PBMCs. Monocytes were cultured at 37° C. in a 96-well plate in the presence of anti-CSF1R blocking antibodies and hCSF-1 for 24 hours. Cell culture supernatants were harvested for measuring CCL2 (MCP-1) secretion. Monocytes alone served as minimal MCP-1 secretion. Monocytes in the presence of hCSF-1 served as maximum MCP-1 secretion. MCP-1 was measured using electrochemiluminescence (Mesoscale Discovery).

[0626] The presence of anti-CSF1R blocking antibodies led to concentration-dependent reduction of MCP-1 (FIG. 34). The monovalent and bivalent anti-CSF1R antibody positive controls, BI027 and BHM1714, showed IC50s of 1.25 nM and −0.002 nM, respectively (FIG. 34). Bispecific antibody constructs BIM0204, BIM0205, BIM0206, and BIM0207 showed IC50 in the range of 5-30 nM while there was no CSF1R blocking activity for BIM0208, BIM0209, BIM0210, and BIM0211 (FIG. 34).

### Example 27: Inhibition of TGFβ Signaling Using TGFβ Trap

[0627] This study examines three TGFβ-trap constructs for their ability to inhibit TGFβ signaling. The first construct, “Single TGFβ Fab-trap” shown in FIG. 36, comprises two chains: the first chain comprises from N-terminus to C-terminus a first TGFBR2 ECD, a first linker, and a heavy chain constant region 1 (CH1); and the second chain comprises from N-terminus to C-terminus a second TGFBR2 ECD, a second linker, and a light chain constant region (CL). This construct does not comprise any targeting domains. The second construct, “Anti-PDL1×TGFβ-trap” shown in FIG. 36, comprises an anti-PDL1 antibody fused, at the C-terminus of its two Fc regions, to a TGFBR2 ECD homodimer. The third construct, “UniTI-102 (Anti-CCR2×anti-CSF1R×TGFβ-trap)” shown in FIG. 36, comprises an anti-CCR2×anti-CSF1R bispecific antibody fused, at the C-terminus of its two Fc regions, to a TGFBR2 ECD homodimer. In addition, a fourth construct, “UniTI-01 (Anti-CCR2×anti-CSF1R)” in FIG. 36, which is an anti-CCR2×anti-CSF1R bispecific antibody without a TGFβ-trap, was used as a negative control.

[0628] Briefly, HEK-Blue TGF-b cells were treated with the four constructs described above in a dose dependent manner in the presence of 0.5 ng/ml of TGF-β1 for 20-22 hours. TGF-β1 binds to receptors on HEK-Blue cells and induces activation of the TGF-β/Smad pathway leading to the formation of a Smad3/Smad4 complex. This heterocomplex enters the nucleus and binds SBE (Smad3/4-binding elements) sites inducing production of SEAP (secreted embryonic alkaline phosphatase). SEAP secreted in the supernatant was quantified by colormetric enzymatic assays (QUANTI-Blue). As shown in FIG. 36, TGF-β1-mediated SEAP production was reduced by all three TGFβ-trap constructs tested here. The anti-CCR2×anti-CSF1R bispecific antibody without a TGFβ-trap did not reduce TGF-β1 signaling (FIG. 36).

### Example 28: Characterization of UniTI-102 Constructs

[0629] In some embodiments, provided herein are multispecific molecules having the configuration shown in FIG. 12J or 39F. In some embodiments, the multispecific molecules comprise an anti-CSF1R binding moiety (e.g., as an scFv), an anti-CCR2 binding moiety (e.g., as a Fab), and a TGFβ Trap (e.g., a TGFβRII homodimer) fused to the C-terminus of a Fc region. Such molecules are referred to as UniTI-102. Without being bound by theory, UniTI-102 may preferentially bind to CSF1R+ CCR2+Mo-MDSCs and TAMs, while exerting inhibitory functions; prevent recruitment of new MDSCs and TAMs; neutralize locally secreted TGFβ and reprogram the stroma to enable T cell infiltration; and/or restore cytotoxic function of infiltrating T cells and NK cells.

[0630] First, a mouse surrogate antibody mUniTI-102 was tested in the EMT6 breast tumor model, which is a syngeneic tumor model resistant to PD1 or TGFβ blockade therapy. mUniTI-102 was administered to EMT6 tumor-bearing B-cell deficient Jh−/− mice at 5 mpk, TIW or 20 mpk BIW. mUniTI-102 depleted mo-MDSCs in EMT6 tumors (FIG. 38A) and preferentially depleted TAMs over tissue-resident macrophages (FIG. 38B). In addition, mUniTI-102 demonstrated anti-tumor activity in this model as a monotherapy (FIGS. 38C and 38D).

[0631] The next few studies examine two UniTI-102 molecules, BIM0648 (also referred to as “0648” or “648”) and BIM0652 (also referred to as “0652” and “652”). Both BIM0648 and BIM0652 have the configuration shown in FIG. 39F. The sequence information of these two molecules is disclosed in Table 34. BIM0648 comprises the amino acid sequences of SEQ ID NO: 127, SEQ ID NO: 131, and SEQ ID NO: 373. BIM0652 comprises the amino acid sequences of SEQ ID NO: 136, SEQ ID NO: 131, and SEQ ID NO: 373.

[0632] The binding of BIM0648 and BIM0652 to whole blood was examined using flow cytometry. Briefly, peripheral blood was collected in tubes containing lithium heparin as anticoagulant from 4 healthy controls. 100 μl of blood was added to each tube and appropriate antibodies (Table 35) were added before incubation in the dark for 30 minutes at 4° C. UniTI-102 constructs were fluorescently labeled with AlexaFlour647 as per manufacturer's instructions (Molecular Probes Inc, Eugene Oreg.) and added to tubes with the antibodies. Effective labeled construct concentrations ranged from 1000 nM to 62.5 μM. Red blood cells were lysed by the addition of Ammonium Chloride (StemCell Technologies, Cambridge Mass.). After lysis, the cells were washed in PBS containing 1% Fetal Bovine Serum and fixed in 1% paraformaldehyde. Samples were run on the Beckman Coulter Cytoflex LX. Instrument settings (cytosettings; unique voltage and compensation matrices) were identical for all donors examined. Raw data was analyzed using FlowJo 10. Single stains and fluorescence minus one (FMO) control tubes were used to define positive/negative populations. All data analysis and graphical representation of the data was performed using Prism 8.1 (GraphPad Software).

TABLE 35
Antibody panel used for cell staining.

| | Marker | Channel | Clone | Vendor |
|---|---|---|---|---|
| 1 | CD3 | BV605 | SP34-2 | BioLegend |
| 2 | CD20 | BV785 | HIB19 | BioLegend |
| 3 | CD56 | PE | 5.1.H11 | BioLegend |
| 4 | CD14 | BV421 | M5E2 | BioLegend |
| 5 | CD16 | FITC | 3G8 | Ancell Corporation |
| 6 | Live/Dead | NUV450 | — | BioLegend |
| 7 | UniT102 | Alexa Fluor 647 | — | — |

[0633] The examination of binding ex vivo in blood (prior to lysis) precluded the need for Fc blocking agents. Additionally, the use of fluorescently labeled probes eliminated the need for secondary detection reagents. Leukocytes were first isolated from lysed RBCs by forward and side scatter. Live cells were gated followed by exclusion of doublets via FSC-A against FSC-H plot which was followed by gating on live single cell populations. Granulocytes were separated from lymphocytes (Low SSC) and monocytes (medium SSC). CD3 and CD56 bivariate plot allowed discrimination of T (CD3+), NK (CD56+) and NK-T (CD3+CD56+) cell populations. From the CD3/CD56 negative cells, CD14 and CD16 bivariate plot was generated for monocytes (CD14+CD16+ classical monocytes, CD14−CD16+ non classical monocytes and CD14+CD16+ intermediate monocytes). Overall, the combination of the 6-marker panel with the fluorescently labeled UniTI-102 constructs allowed examination of binding of UniTI-102 constructs as percentages of parents and grandparent populations in a total of 5 different primary cell populations: granulocyte, T, NK, B and monocytes. The protocol used enabled quantitation of monocytes and granulocytes in addition to lymphocyte populations.

[0634] Both BIM0648 and BIM0652 preferentially bound to primary human classical monocytes in whole blood (FIGS. 39B and 39D). Binding to intermediate monocytes was observed and was weaker than binding to classical monocytes. UniTI-102 molecules showed minimal to no engagement with T, B, NK or granulocytes in whole blood (data not shown).

[0635] The ability of BIM0648 and BIM0652 to neutralize TGFβ was confirmed by various in vitro functional assays described below.

[0636] Both BIM0648 and BIM0652 inhibited TGFβ-induced SMAD-dependent reporter activity (FIG. 40A).

[0637] To test the ability of UniTI-102 to inhibit human Treg differentiation from naïve CD4+ T cells, human naïve CD4+ T cells were isolated from fresh PBMCs, and 150,000 cells/well were added to a 96-well round bottom plate pre-coated with anti-CD3 Ab (OKT3; 5 μg/mL). Cells were cultured in X-VIVO15 media with 2 mM L-glutamine, IL-2 (50 ng/mL), TGFβ (10 ng/mL), and anti-CD28 Ab (1 μg/mL) for 6-days at 37° C., with the following constructs: UniTI-102, anti-PD-L1/anti-TGFβ-Trap, or human IgG1 at 6.2 nM. Controls included cells without constructs: with TGFβ (TGFβ+) for the maximum induction of T-reg differentiation, and without TGFβ (TGFβ−) for baseline inhibition. On day 6, cells were washed and stained with viability dye followed by an extracellular antibody cocktail (anti-CD3, anti-CD4, and anti-CD25). Cells were then fixed, permeabilized, and stained for intracellular foxp3 with an anti-Foxp3 Ab (150D; 1:50 dilution). Samples were acquired on Beckman Coulter Cytoflex machine and gated on live, CD3+, CD4+, and CD25+/Foxp3+ cells. As shown in FIG. 40B, UniTI-102 inhibited TGFβ-induced human Treg differentiation from naïve CD4+ T cells.

[0638] Next, UniTI-102 was tested for its ability to reverse the suppressive effect of TGFβ on primary NK cell-mediated lysis of K562 cells. Briefly, frozen primary NK cells were thawed and rested overnight in X-VIVO15 medium supplemented with 20% FBS and 100 IU/mL recombinant human IL-2. Cells were then seeded at 1×10⁶ cells/ml and treated for 3 days with TGFβ (10 ng/mL) alone, or TGFβ with (i) UniTI-102, (ii) anti-PD-L1-TGFβ-Trap, or (iii) human IgG1 at 20 nM. On day 3, treated NK cells were counted, and incubated with CFSE-labeled K562 cells at E:T ratio of 10:1 for 4 hours. Cells were then stained with viability dye followed by an antibody cocktail (anti-CD56, anti-NKp30 and anti-NKG2). Samples were acquired on Beckman Coulter Cytoflex machine and analyzed by FlowJo software. As shown in FIG. 40C, TGFβ reduced primary NK cell-mediated lysis of K562 cells and this suppressive effect of TGFβ could be reversed by UniTI-102.

[0639] Furthermore, a study was conducted to examine the ability of UniTI-102 to suppress M2 polarization driven by conditioned medium (CM) from SW480 (MSS CRC cell line). To generate tumor-conditioned medium (TCM), SW840 colon cancer cells (Cat #CCL-228, ATCC) were seeded in 10% FBS/RPMI1640 medium and after 24 hours were switched to 0.2% FBS/RPMI1640 medium. Medium was collected after 48 hours, filtered, restored to 10% FBS, and was used fresh, or frozen at −80° C. Monocytes were isolated from healthy donor PBMCs (AllCells) by classical monocyte isolation kit (Cat #130-117-337, Miltenyi Biotec), and seeded in SW480 TCM with 50 ng/ml M-CSF (Cat #300-25, PeproTech) at 1×10⁶/ml in 2 ml/well in 6-well plates. After 3 days, the medium was replenished with 1 ml SW480 TCM/50 ng/ml M-CSF. Monocytes were treated with UniTI-102 or human IgG1 (Cat #403502, BioLegend) for 48 hours. Cells were harvested by treatment with Versene (Cat #15040066, ThermoFisher), incubated with Zombie UV viability dye (Cat #423108, BioLegend), incubated with fluorophore-conjugated CD206 and HLA antibodies (both from Biolegend), acquired on CytoFLEX (Beckman Coulter) flow cytometer, and analyzed by FlowJo software. SW840 colon cancer cells secreted high levels of TGFβ1 (FIG. 40D), which drives M2 polarization. BIM0648 suppressed SW840 CM-induced M2 polarization as evidenced by a reduction in CD206 (a M2 marker) expression (FIG. 40E) and an increase in HLA (a M1 marker) expression (FIG. 40F).

[0640] In some embodiments, UniTI-102 can be used for the treatment of microsatellite-stable (MSS) colorectal cancer. In CRC patients, increased TGFβ1 levels may predict adverse outcomes (Calon et al., Nat Genet. 2015 April; 47(4):320-9). CRC recurrence and metastasis strictly depends on high TGFβ signaling (Calon et al., Cancer Cell. 2012 Nov. 13; 22(5):571-84); and deletion of Tgfbr2 in myeloid cells significantly inhibits tumor metastasis in preclinical models (Pang et al., Cancer Discov. 2013 August; 3(8):936-51). An immune subset of MSS GI tumors, including CRC, consists of CD163+ myeloid cells with high CCR2, CSF1R and TGFβ1 expression. Majority of PD-L1 is expressed by myeloid cells in CRC MSI patients (Llosa et al., Cancer Discov. 2015 January; 5(1):43-51). MSS CRC patients express low to undetectable PD-L1. Metastasis associated TAMs maintain CCR2 and CSF1R co expression.

[0641] Without being bound by theory, UniTI-102 may induce/restore anti-tumor response in the MSS CRC via complementary and/or synergistic mechanisms. For example, neutralization of locally secreted TGFβ by UniTI-102 may reprogram the stroma to enable immune cell infiltration. Co-inhibition of CCR2 and CSF1R by UniTI-102 may prevent infiltration of new monocytes derived immunosuppressive myeloid cells due to TGFβ inhibition.

[0642] In some embodiments, UniTI-102 may be combined with chemo/radiation, anti-angiogenic or immune checkpoint therapies. Radiation therapy, chemotherapy or anti-VEGF therapies are shown to recruit TAMs and MDSCs and increase TGFβ levels, which are associated with tumor recurrence and/or resistance. Blood based biomarkers for demonstrating target engagement and relevant biological responses are useful in early clinical trials.

[0643] In summary, UniTI-102 molecules are tri-specific molecules simultaneously targeting CCR2, CSF1R and TGFβ. UniTI-102 molecules preferentially bind to CCR2 and CSF1R double positive cells: mo-MDSCs, TAMs, and classical monocytes. All three arms of UnITI-102 are capable of functionally blocking the intended targets. Cynomolgus monkey studies confirmed target engagement for all three arms of UniTI-102, with biological responses consistent with CSF1R blockade in vivo.

### INCORPORATION BY REFERENCE

[0644] All publications and patents mentioned herein are hereby incorporated by reference in their entirety as if each individual publication or patent was specifically and individually indicated to be incorporated by reference.

### EQUIVALENTS

[0645] Those skilled in the art will recognize, or be able to ascertain using no more than routine experimentation, many equivalents to the specific embodiments of the invention described herein. Such equivalents are intended to be encompassed by the following claims.

The application's sequence listing, which the Patent Office published only in electronic form, follows.

SEQUENCE LISTING (481 sequences)

SEQ ID NO: 1 - DNA, 348 bp, Artificial Sequence
  source: /note="Description of Artificial Sequence: Synthetic polynucleotide"
caggtccagctgcaagagtctggccctggactggttcagccctctcagaccctgtctctgacctgtaccgtgtccggcttctccctgaccgacttctctgtgcactgggtccgacagcctccaggcaaaggactggaatggatgggcagaatcagatccgagggcaacaccgactacaacagcgccctgaagtcccggctgtctatcagcagagacacctccaagagccaggtgttcctgaagatgaactccctgcagaccgaggacaccgccatctatttctgcaccagaggcgacatcctcggcttcggctattggggacagggcgtgatggtcaccgttagctct

SEQ ID NO: 2 - DNA, 336 bp, Artificial Sequence
  source: /note="Description of Artificial Sequence: Synthetic polynucleotide"
gacatcgtgatgacccagtctccactgtccgtgtctgtgacccctggcgagtctgcctccatctcctgcagatcctccaagagcctgctgcacttcaagggcatcaccttcgtgtactggtatctgcagaagcccggccagtctcctcagctgctgatcttcagaatgtccagcctggcctctggcgtgcccgatagattttctggctccggctccgagacagacttcaccctgaagatctccagagtggaagccgaggacgtgggcacctactattgtggccagctgctggaaaacccctacacctttggcgctggcaccaagctggaactgaag

SEQ ID NO: 3 - DNA, 294 bp, Artificial Sequence
  source: /note="Description of Artificial Sequence: Synthetic polynucleotide"
gctcagaccaccgctcctagcgtgtaccctttggctcctggctgtggcgacaccacctcttctacagtgaccctgggctgtctggtcaagggctactttcctgagcctgtgaccgtgacctggaactctggtgccctgtcctccgacgtgcacacctttccagctgtgctgcagtccggcctgtacaccctgacatcctccgtgacctcttccacctggcctagccagaccgtgacatgcaatgtggctcaccctgcctccagcaccaaggtggacaagaaggtggaacggcgg

SEQ ID NO: 4 - DNA, 321 bp, Artificial Sequence
  source: /note="Description of Artificial Sequence: Synthetic polynucleotide"
agagctgacgctgcccctaccgtgtctatcttccctccatccatggaacagctgacctctggcggagctaccgtcgtgtgcttcgtgaacaacttctaccctcgggacatctccgtgaagtggaagatcgacggctctgagcagcgagatggcgtgctggattctgtgaccgaccaggactccaaggacagcacctactccatgtctagcaccctgagcctgaccaaggtggaatacgagcggcacaacctgtatacctgcgaggtggtgcacaagacctccagctctcccgtggtcaagtccttcaaccggaacgagtgc

SEQ ID NO: 5 - DNA, 354 bp, Artificial Sequence
  source: /note="Description of Artificial Sequence: Synthetic polynucleotide"
caggtccagttgcagcagtctggcgctgagctggtcaagcctggatcctccgtgaagatctcctgcaaggcctccggctacaccttcacctccaacttcatgcactggatcaagcagcagcccggcaacggcctggaatggatcggatggatctatcctggcgacggcgacaccgagtacaaccagaagttcaacggcaaggctaccctgaccgccgacaagtcctcttccaccgcttacatgcagctgtccagcctgacctctgaggactccgccgtgtacttctgcgccgtgaattatggcggctacgtgctggatgcttggggccaaggcgcttctgtgacagtgtcctct

SEQ ID NO: 6 - DNA, 309 bp, Artificial Sequence
  source: /note="Description of Artificial Sequence: Synthetic polynucleotide"
gccgagacaaccgctcctagcgtttaccctctggctcctggcacagccctgaagtccaactctatggtcaccctgggctgcctggtcaagggctactttcctgagcctgtgaccgtgacctggaactctggtgctctgtctagcggcgtgcacacctttccagctgtgctgcagagcggcctgtacaccctgacatctagcgtgaccgtgccttccagcacctggtctagtcaggctgtgacctgcaacgtggcccatcctgcctcttctaccaaggtggacaagaaaatcgtgcccagagagtgcaac

SEQ ID NO: 7 - DNA, 318 bp, Artificial Sequence
  source: /note="Description of Artificial Sequence: Synthetic polynucleotide"
gagatcgtgctgacccagtctcctaccaccatggctgctagccctggcgagaaagtgacaattacctgccgggcctcctcctccaccaactacatgtcctggtatcagcagaagtccggcgcctctcctaagccttggatctacgagacatccaagctggcctctggcgtgcccgatagattttccggctctggctccggcacctcctacagcttcaccatctccagcatggaaacagaggacgccgccacctactactgccaccagtggtcatctacccctctgacctttggcagcggcaccaagctggaaatcaag

SEQ ID NO: 8 - DNA, 321 bp, Artificial Sequence
  source: /note="Description of Artificial Sequence: Synthetic polynucleotide"
agagctgacgccgctcctaccgtgtctatcttccctccatccatggaacagctgacctccggcggagctaccgtcgtgtgtttcgtgaacaacttctaccctcgggacatctccgtgaagtggaagatcgacggctctgagcagcgagatggcgtgctggattctgtgaccgaccaggactccaaggacagcacctactccatgtctagcaccctgagcctgaccaaggtggaatacgagcggcacaacctgtatacctgcgaggtggtgcacaagacctccagctctcccgtggtcaagtccttcaaccggaacgagtgc

SEQ ID NO: 9 - DNA, 684 bp, Artificial Sequence
  source: /note="Description of Artificial Sequence: Synthetic polynucleotide"
accattaagccttgtcctccatgcaagtgccccgctcctaatctgctcggaggcccttccgtgttcatctttccacctaagatcaaggacgtgctgatgatctccctgtctcctatcgtgacctgcgtggtggtggacgtgtccgaggatgatcctgacgtgcagatcagttggttcgtgaacaacgtggaagtgcacaccgctcagacccagacacacagagaggactacaactctaccctgagagtggtgtctgccctgcctatccagcatcaggactggatgtccggcaaagaattcaagtgcaaagtgaacaacaaggacctgcctgctccaatcgagcggaccatctctaagcctaagggctctgtcagggcccctcaggtgtacgttctgcctccttgcgaggaagagatgaccaagaaacaagtgacactgtggtgcatggtcacagacttcatgcccgaggacatctacgtggaatggaccaacaacggcaagaccgagctgaactacaagaacaccgagcctgtgctggactccgacggctcctacttcatgtactccaagctgcgcgtcgagaagaagaactgggtcgagagaaactcctactcctgctccgtggtgcacgagggcctgcacaatcaccacaccaccaagtccttctctcggacccctggcaag

SEQ ID NO: 10 - DNA, 684 bp, Artificial Sequence
  source: /note="Description of Artificial Sequence: Synthetic polynucleotide"
accatcaagccctgtcctccatgcaagtgccccgctcctaatctgctcggaggcccttccgtgttcatcttcccacctaagatcaaggacgtgctgatgatctccctgtctcctatcgtgacctgcgtggtggtggacgtgtccgaggatgatcctgacgtgcagatcagttggttcgtgaacaacgtggaagtgcacaccgctcagacccagacacacagagaggactacaacagcaccctgagagtggtgtctgccctgccaatccagcaccaggattggatgtccggcaaagaattcaagtgcaaagtgaacaacaaggacctgcctgctccaatcgagcggaccatctctaagcctaagggctctgtgcgggctccccaagtttgtgttctgcctccacctgaggaagagatgaccaagaaacaagtgaccctgtcttgtgccgtgaccgacttcatgcccgaggacatctacgtggaatggaccaacaatggcaagaccgagctgaactacaagaacaccgagcctgtgctggactccgacggctcctacttcatggtgtctaagctgcgcgtcgagaagaagaactgggtcgagagaaactcctactcctgctccgtggtgcacgagggcctgcacaatcaccacaccaccaagtccttctctcggacccctggcaag

SEQ ID NO: 11 - DNA, 474 bp, Artificial Sequence
  source: /note="Description of Artificial Sequence: Synthetic polynucleotide"
gaggtgcagctggttgaatctggcggaggactggttaagcctggcggctctctgagactgtcttgtgccgcttctggcttcaccttctccgcctacgccatgaactgggtccgacaggctcctggcaaaggcctggaatgggtcggaagaatccggaccaagaacaacaactacgccacctactacgccgactccgtgaaggaccggttcaccatctctcgggacgactccaagaacaccctgtacctgcagatgaactccctgaaaaccgaggacaccgccgtgtactactgcaccaccttctacggcaatggcgtgtggggacagggcacactggttaccgtttcttccgcctccaccaagggaccctctgtgtttcctctggctccctccagcaagtctacctctggtggaacagctgccctgggctgcctggtcaaggattactttcctgagcctgtgaccgtgtcctgg

SEQ ID NO: 12 - DNA, 309 bp, Artificial Sequence
  source: /note="Description of Artificial Sequence: Synthetic polynucleotide"
gcttctaccaagggacccagcgtgttccctctggctccttccagcaagtctacctctggcggaacagctgctctgggctgcctggtcaaggactactttcctgagcctgtgaccgtgtcttggaactctggcgctctgacatccggcgtgcacacatttccagctgtgctgcagtcctccggcctgtactctctgtcctctgtcgtgaccgtgccttccagctctctgggaacccagacctacatctgcaatgtgaaccacaagccttccaacaccaaggtggacaagagagtggaacccaagtcctgc

SEQ ID NO: 13 - DNA, 681 bp, Artificial Sequence
  source: /note="Description of Artificial Sequence: Synthetic polynucleotide"
gataagacccacacatgtcctccatgccctgcccctgagctgctgggcggaccttccgtgttcctgttccctccaaagcccaaggacaccctgatgatcagccggacccctgaagtgacctgcgtggtggtggatgtgtcccacgaggatcccgaagtgaagttcaattggtacgtggacggcgtggaagtgcacaacgccaagaccaagcccagagaggaacagtacaacagcacctaccgggtggtgtccgtgctgaccgtgctgcatcaggactggctgaacggcaaagagtacaagtgcaaggtgtccaacaaggccctgcctgcccctatcgagaaaaccatcagcaaggccaagggccagccccgcgaacctcaggtgtacacactgcctccctgccgggaagagatgaccaagaaccaggtgtccctgtggtgcctggtcaagggcttctacccctccgatatcgccgtggaatgggagagcaacggccagcccgagaacaactacaagaccacccctcccgtgctggacagcgacggcagcttcttcctgtactccaaactgaccgtggacaagagccggtggcagcagggcaatgtgttcagctgtagcgtgatgcacgaggccctgcacaaccactacacccagaagtccctgagcctgtctcctggcaaa

SEQ ID NO: 14 - DNA, 336 bp, Artificial Sequence
  source: /note="Description of Artificial Sequence: Synthetic polynucleotide"
gacgtggtcatgacacagagccctctgtctctgcccgtgacattgggacagcctgcctccatctcctgcaagtcctctcagtccctgctggactctgacggcaagaccttcctgaactggttccagcagcggcctggccagtctcctagaaggctgatctacctggtgtccaagctggattctggcgtgcccgacagattctccggctctggctctggcaccgacttcaccctgaagatctccagagtggaagccgaggacgtgggcgtgtactactgttggcagggcacccactttccatacaccttcggccagggcaccagactggaaatcaag

SEQ ID NO: 15 - DNA, 321 bp, Artificial Sequence
  source: /note="Description of Artificial Sequence: Synthetic polynucleotide"
agaacagtggccgctccttccgtgttcatcttcccaccctccgacgagcagctgaagtccggcaccgcttctgtcgtgtgcctgctcaacaacttctaccctcgggaagccaaggtgcagtggaaggtggacaacgccctgcagtccggcaactcccaggaatccgtcaccgagcaggactccaaggacagcacctactccctgtcctccaccctgaccctgtccaaggccgactacgagaagcacaaggtgtacgcctgcgaagtgacccaccagggcctgagcagccccgtgaccaagtccttcaaccggggcgagtgc

SEQ ID NO: 16 - DNA, 342 bp, Artificial Sequence
  source: /note="Description of Artificial Sequence: Synthetic polynucleotide"
gaagtgcagctggttcagtctggcgccgaagtgaagaaacctggcgcctctgtgaaggtgtcctgcaaggcttctggctacacctttaccggctaccacatgcactgggtccgacaggctccaggacaaggcttggaatggatgggctggatcaaccccaactccggcgtgaccaaatacgcccagaaattccagggcagagtgaccatgaccagagacacctccatcaacaccgcctacatggaactgtcccggctgagattcgacgacaccgacgtgtactactgtgccaccggcggctttggctattggggagagggaacactggtcaccgtgtcctcc

SEQ ID NO: 17 - DNA, 330 bp, Artificial Sequence
  source: /note="Description of Artificial Sequence: Synthetic polynucleotide"
ctgcccgtgttgacccagcctcctagcgtttccaagggcctgagacagaccgccacactgacctgtaccggcaactctaacaacgtgggcaatcagggcgctgcctggttgcagcagcatcagggacagcctccaaagctgctgtcctaccggaaccacaacagacctagcggcgtgtccgagcggttcagcccttctagatctggcgacacctccagcctgaccatcactggactgcagcctgaggacgaggccgactactattgtctggcctgggacagctccctgcgggcctttgtttttggcaccggcaccaagctgaccgtgctg

SEQ ID NO: 18 - DNA, 318 bp, Artificial Sequence
  source: /note="Description of Artificial Sequence: Synthetic polynucleotide"
ggacaacctaaggccaatcctaccgtgacactgttccctccatcctccgaggaactgcaggccaacaaggctaccctcgtgtgcctgatctccgacttttaccctggcgctgtgaccgtggcctggaaggctgatggatctcctgtgaaggctggcgtggaaaccaccaagccttccaagcagtccaacaacaaatacgccgcctcctcctacctgtctctgacccctgaacagtggaagtcccaccggtcctacagctgccaagtgacccatgagggctccaccgtggaaaagaccgtggctcctaccgagtgctcc

SEQ ID NO: 19 - DNA, 372 bp, Artificial Sequence
  source: /note="Description of Artificial Sequence: Synthetic polynucleotide"
caggtgcagctggttcagtctggcgccgaagtgaagaaacctggcgcctctgtgaaggtgtcctgcaaggcttccggctacaccttctccagctactacatgcactgggtccgacaggcccctggacaaggattggagtggatgggcatcatcaacccctctggcggcaacacctcttacgcccagaaattccagggcagagtgaccatgaccagagacacctccaccagcaccgtgtacatggaactgtccagcctgagatccgaggacaccgccgtgtactactgtgccagaggcggataccagctgcctcacggtagagccagagccttcgatatgtggggccagggcacaatggtcaccgtgtcctct

SEQ ID NO: 20 - DNA, 336 bp, Artificial Sequence
  source: /note="Description of Artificial Sequence: Synthetic polynucleotide"
gccatcagaatgacccagtctccactgagcctgcctgtgacattgggccagcctgcctctatctcctgcacctcctctcagtctctggtgtacagagatggcaccacctacctgaactggttccagcagaggcctggccagtctcctagacggctgatctacaaggtgtccaacagagactctggcgtgcccgacagattcaccggctctggctctggcaccacattcaccctgaccatctccagagtggaagccgaggacgtgggcatctactactgtatgcagggcacccactggcctctgacctttggccagggaacaaaggtggaaatcaag

SEQ ID NO: 21 - DNA, 336 bp, Artificial Sequence
  source: /note="Description of Artificial Sequence: Synthetic polynucleotide"
gaggtgcagctggttgaatctggcggaggattggttcagcctggcggctctctgagactgtcttgtgtggcctctggcttcaccttctccgactactggatgtcctgggtccgacaggctcctggcaaaggactggaatgggtcgccaacatcaagaaagacggctccgtgaactactacgtggactccgtgaagggcagattcaccatctctcgggacaacgccaagaactccctgtacctgcagatgaacagcctgagagccgaggacaccgccgtgtactactgcaccagattcgattactggggccagggcaccctggtcacagtgtcctct

SEQ ID NO: 22 - DNA, 330 bp, Artificial Sequence
  source: /note="Description of Artificial Sequence: Synthetic polynucleotide"
caggctggcttgacccagcctcctagcgtttccaagggcctgagacagaccgccacactgacctgtaccggcaactctaacaacgtgggcaatcagggcgctgcctggttgcagcagcatcagggacatcctccaaagctgctgttctaccggaacaacaacagagcctccggcatctccgagcggctgtctgcttctagatccggcaataccgccagcctgaccatcactggactgcagcctgaggacgaggccgactactattgcctgacctgggactcctctctgtccgtggtggtttttggcggaggcaccaagctgacagtgctg

SEQ ID NO: 23 - DNA, 348 bp, Artificial Sequence
  source: /note="Description of Artificial Sequence: Synthetic polynucleotide"
caggtgcagctggttcagtctggcgccgaagtgaagaaacctggcgcctctgtgaaggtgtcctgcaaggcttccggctacacctttaccagctacgacatctcctgggtccgacaggctcctggacaaggcttggaatggatgggcgtgatctggaccgatggcggcaccaattacgcccagaaactgcagggcagagtgaccatgaccaccgacacctctacctccaccgcctacatggaactgcggtccctgagatctgacgacaccgccgtgtactactgcgccagagatcagcggctgtacttcgatgtgtggggccagggcacaaccgtgacagtgtcctct

SEQ ID NO: 24 - DNA, 318 bp, Artificial Sequence
  source: /note="Description of Artificial Sequence: Synthetic polynucleotide"
gacatccagatgacccagtctccatcctctctgtccgcctctgtgggcgacagagtgaccatcacctgtagagcctccgaggacgtgaacacctacgtgtcctggtatcagcagaagcccggcaaggctcccaagctgctgatctacgccgcctctaacagatacaccggcgtgccctctagattctccggctctggctctggcaccgactttaccctgacaatctccagcctgcagcctgaggacttcgccacctactactgccagcagtccttcagctaccccacctttggccagggcaccaagctggaaatcaag

SEQ ID NO: 25 - DNA, 681 bp, Artificial Sequence
  source: /note="Description of Artificial Sequence: Synthetic polynucleotide"
gataagacccacacctgtcctccctgccctgcccctgaactgctgggcggacctagcgtgttcctgttccctccaaagcccaaggacaccctgatgatcagccggacccctgaagtgacctgcgtggtggtggatgtgtcccacgaggatcccgaagtgaagttcaattggtacgtggacggcgtggaagtgcacaacgccaagaccaagcccagagaggaacagtacaacagcacctaccgggtggtgtccgtgctgaccgtgctgcaccaggactggctgaacggcaaagagtacaagtgcaaggtgtccaacaaggccctgccagcccctatcgagaaaaccatcagcaaggccaagggccagcctagagagcctcaggtctgcaccctgcctcccagccgggaagagatgaccaagaaccaggtgtccctgagctgcgccgtgaagggcttctacccctccgatatcgccgtggaatgggagagcaacggccagcccgagaacaactacaagaccacccctcccgtgctggacagcgacggcagcttcttcctggtgtccaaactgaccgtggacaagagccggtggcagcagggcaatgtgttcagctgtagcgtgatgcacgaggccctgcacaaccactacacccagaagtctctgagcctgagccctggcaaa

SEQ ID NO: 26 - DNA, 366 bp, Artificial Sequence
  source: /note="Description of Artificial Sequence: Synthetic polynucleotide"
caggtgcagctggttcagtctggcgccgaagtgaagaaacctggctcctccgtgaaggtgtcctgcaaggcttctggctacacctttaccgacaactacatgatctgggtccgacaggctcctggacagggacttgagtggatgggcgacatcaacccttacaacggcggcaccaccttcaaccagaaattcaagggcagagtgaccatcaccgccgacaagtctacctccaccgcctacatggaactgtccagcctgagatctgaggacaccgccgtgtactactgcgccagagagtccccttacttctccaacctgtacgtgatggactactggggccagggcacactggtcacagtgtcctct

SEQ ID NO: 27 - DNA, 333 bp, Artificial Sequence
  source: /note="Description of Artificial Sequence: Synthetic polynucleotide"
gagatcgtgctgacccagtctcctgccacactgtcactgtctccaggcgagagagctaccctgtcctgcaaggcttctcagtccgtggactacgacggcgacaactacatgaactggtatcagcagaagcccggccaggctcctagactgctgatctacgccgcctccaacctggaatctggcatccccgctagattctccggctctggctctggcacagactttaccctgaccatctccagcctggaacctgaggacttcgccgtgtactactgccacctgtccaacgaggacctgtccacatttggcggaggcaccaaggtggaaatcaag

SEQ ID NO: 28 - DNA, 1392 bp, Artificial Sequence
  source: /note="Description of Artificial Sequence: Synthetic polynucleotide"
atggaaaccgacacactgctgctgtgggtgctgctcttgtgggtgccaggatctacaggacaggtccagctgcaagagtctggccctggactggttcagccctctcagaccctgtctctgacctgtaccgtgtccggcttctccctgaccgacttctctgtgcactgggtccgacagcctccaggcaaaggactggaatggatgggcagaatcagatccgagggcaacaccgactacaacagcgccctgaagtcccggctgtctatcagcagagacacctccaagagccaggtgttcctgaagatgaactccctgcagaccgaggacaccgccatctatttctgcaccagaggcgacatcctcggcttcggctattggggacagggcgtgatggtcaccgttagctctgctcagaccaccgctcctagcgtgtaccctttggctcctggctgtggcgacaccacctcttctacagtgaccctgggctgtctggtcaagggctactttcctgagcctgtgaccgtgacctggaactctggtgccctgtcctccgacgtgcacacctttccagctgtgctgcagtccggcctgtacaccctgacatcctccgtgacctcttccacctggcctagccagaccgtgacatgcaatgtggctcaccctgcctccagcaccaaggtggacaagaaggtggaacggcggaccattaagccttgtcctccatgcaagtgccccgctcctaatctgctcggaggcccttccgtgttcatctttccacctaagatcaaggacgtgctgatgatctccctgtctcctatcgtgacctgcgtggtggtggacgtgtccgaggatgatcctgacgtgcagatcagttggttcgtgaacaacgtggaagtgcacaccgctcagacccagacacacagagaggactacaactctaccctgagagtggtgtctgccctgcctatccagcatcaggactggatgtccggcaaagaattcaagtgcaaagtgaacaacaaggacctgcctgctccaatcgagcggaccatctctaagcctaagggctctgtcagggcccctcaggtgtacgttctgcctccttgcgaggaagagatgaccaagaaacaagtgacactgtggtgcatggtcacagacttcatgcccgaggacatctacgtggaatggaccaacaacggcaagaccgagctgaactacaagaacaccgagcctgtgctggactccgacggctcctacttcatgtactccaagctgcgcgtcgagaagaagaactgggtcgagagaaactcctactcctgctccgtggtgcacgagggcctgcacaatcaccacaccaccaagtccttctctcggacccctggcaagtgatga

SEQ ID NO: 29 - DNA, 723 bp, Artificial Sequence
  source: /note="Description of Artificial Sequence: Synthetic polynucleotide"
atggaaaccgacacactgctgctgtgggtgctgctcttgtgggtgccaggatctaccggcgacatcgtgatgacccagtctccactgtccgtgtctgtgacccctggcgagtctgcctccatctcctgcagatcctccaagagcctgctgcacttcaagggcatcaccttcgtgtactggtatctgcagaagcccggccagtctcctcagctgctgatcttcagaatgtccagcctggcctctggcgtgcccgatagattttctggctccggctccgagacagacttcaccctgaagatctccagagtggaagccgaggacgtgggcacctactattgtggccagctgctggaaaacccctacacctttggcgctggcaccaagctggaactgaagagagctgacgctgcccctaccgtgtctatcttccctccatccatggaacagctgacctctggcggagctaccgtcgtgtgcttcgtgaacaacttctaccctcgggacatctccgtgaagtggaagatcgacggctctgagcagcgagatggcgtgctggattctgtgaccgaccaggactccaaggacagcacctactccatgtctagcaccctgagcctgaccaaggtggaatacgagcggcacaacctgtatacctgcgaggtggtgcacaagacctccagctctcccgtggtcaagtccttcaaccggaacgagtgctgatga

SEQ ID NO: 30 - DNA, 1413 bp, Artificial Sequence
  source: /note="Description of Artificial Sequence: Synthetic polynucleotide"
atggaaaccgacacactgctgctgtgggtgctgctcttgtgggtgccaggatctacaggacaggtccagttgcagcagtctggcgctgagctggtcaagcctggatcctccgtgaagatctcctgcaaggcctccggctacaccttcacctccaacttcatgcactggatcaagcagcagcccggcaacggcctggaatggatcggatggatctatcctggcgacggcgacaccgagtacaaccagaagttcaacggcaaggctaccctgaccgccgacaagtcctcttccaccgcttacatgcagctgtccagcctgacctctgaggactccgccgtgtacttctgcgccgtgaattatggcggctacgtgctggatgcttggggccaaggcgcttctgtgacagtgtcctctgccgagacaaccgctcctagcgtttaccctctggctcctggcacagccctgaagtccaactctatggtcaccctgggctgcctggtcaagggctactttcctgagcctgtgaccgtgacctggaactctggtgctctgtctagcggcgtgcacacctttccagctgtgctgcagagcggcctgtacaccctgacatctagcgtgaccgtgccttccagcacctggtctagtcaggctgtgacctgcaacgtggcccatcctgcctcttctaccaaggtggacaagaaaatcgtgcccagagagtgcaacaccatcaagccctgtcctccatgcaagtgccccgctcctaatctgctcggaggcccttccgtgttcatcttcccacctaagatcaaggacgtgctgatgatctccctgtctcctatcgtgacctgcgtggtggtggacgtgtccgaggatgatcctgacgtgcagatcagttggttcgtgaacaacgtggaagtgcacaccgctcagacccagacacacagagaggactacaacagcaccctgagagtggtgtctgccctgccaatccagcaccaggattggatgtccggcaaagaattcaagtgcaaagtgaacaacaaggacctgcctgctccaatcgagcggaccatctctaagcctaagggctctgtgcgggctccccaagtttgtgttctgcctccacctgaggaagagatgaccaagaaacaagtgaccctgtcttgtgccgtgaccgacttcatgcccgaggacatctacgtggaatggaccaacaatggcaagaccgagctgaactacaagaacaccgagcctgtgctggactccgacggctcctacttcatggtgtctaagctgcgcgtcgagaagaagaactgggtcgagagaaactcctactcctgctccgtggtgcacgagggcctgcacaatcaccacaccaccaagtccttctctcggacccctggcaagtgatga

SEQ ID NO: 31 - DNA, 705 bp, Artificial Sequence
  source: /note="Description of Artificial Sequence: Synthetic polynucleotide"
atggaaaccgacacactgctgctgtgggtgctgctcttgtgggtgccaggatctacaggcgagatcgtgctgacccagtctcctaccaccatggctgctagccctggcgagaaagtgacaattacctgccgggcctcctcctccaccaactacatgtcctggtatcagcagaagtccggcgcctctcctaagccttggatctacgagacatccaagctggcctctggcgtgcccgatagattttccggctctggctccggcacctcctacagcttcaccatctccagcatggaaacagaggacgccgccacctactactgccaccagtggtcatctacccctctgacctttggcagcggcaccaagctggaaatcaagagagctgacgccgctcctaccgtgtctatcttccctccatccatggaacagctgacctccggcggagctaccgtcgtgtgtttcgtgaacaacttctaccctcgggacatctccgtgaagtggaagatcgacggctctgagcagcgagatggcgtgctggattctgtgaccgaccaggactccaaggacagcacctactccatgtctagcaccctgagcctgaccaaggtggaatacgagcggcacaacctgtatacctgcgaggtggtgcacaagacctccagctctcccgtggtcaagtccttcaaccggaacgagtgctgatga

SEQ ID NO: 32 - DNA, 1407 bp, Artificial Sequence
  source: /note="Description of Artificial Sequence: Synthetic polynucleotide"
atggaaaccgacacactgctgctgtgggtgctgctcttgtgggtgccaggatctacaggcgaggtgcagctggttgaatctggcggaggactggttaagcctggcggctctctgagactgtcttgtgccgcttctggcttcaccttctccgcctacgccatgaactgggtccgacaggctcctggcaaaggcctggaatgggtcggaagaatccggaccaagaacaacaactacgccacctactacgccgactccgtgaaggaccggttcaccatctctcgggacgactccaagaacaccctgtacctgcagatgaactccctgaaaaccgaggacaccgccgtgtactactgcaccaccttctacggcaatggcgtgtggggacagggcacactggttaccgtttcttccgcctccaccaagggaccctctgtgtttcctctggctccctccagcaagtctacctctggtggaacagctgccctgggctgcctggtcaaggattactttcctgagcctgtgaccgtgtcctggaactctggcgctctgacatctggcgtgcacacctttccagctgtgctgcagtcctctggcctgtactctctgtcctccgtcgtgaccgtgccttctagctctctgggcacccagacctacatctgcaatgtgaaccacaagccttccaacaccaaggtggacaagagagtggaacccaagtcctgcgacaagacccacacctgtcctccatgtcctgctccagaactgctcggcggaccttccgtgttcctgtttcctccaaagcctaaggacaccctgatgatctctcggacccctgaagtgacctgcgtggtggtggatgtgtctcacgaggatcccgaagtgaagttcaattggtacgtggacggcgtggaagtgcacaacgccaagaccaagcctagagaggaacagtacaactccacctacagagtggtgtccgtgctgaccgtgctgcaccaggattggctgaacggcaaagagtacaagtgcaaggtgtccaacaaggccctgcctgctcctatcgaaaagaccatctccaaggccaagggccagcctagggaaccccaggtttacaccctgcctccatgccgggaagagatgaccaagaatcaggtgtccctgtggtgcctcgtgaagggcttctacccttccgatatcgccgtggaatgggagagcaatggccagcctgagaacaactacaagacaacccctcctgtgctggactccgacggctcattcttcctgtactccaagctgacagtggacaagtccagatggcagcagggcaacgtgttctcctgctccgtgatgcacgaggccctgcacaatcactacacccagaagtccctgtctctgtcccctggcaagtgatga

SEQ ID NO: 33 - DNA, 723 bp, Artificial Sequence
  source: /note="Description of Artificial Sequence: Synthetic polynucleotide"
atggaaaccgacacactgctgctgtgggtgctgctcttgtgggtgccaggatctacaggcgacgtggtcatgacacagagccctctgtctctgcccgtgacattgggacagcctgcctccatctcctgcaagtcctctcagtccctgctggactctgacggcaagaccttcctgaactggttccagcagcggcctggccagtctcctagaaggctgatctacctggtgtccaagctggattctggcgtgcccgacagattctccggctctggctctggcaccgacttcaccctgaagatctccagagtggaagccgaggacgtgggcgtgtactactgttggcagggcacccactttccatacaccttcggccagggcaccagactggaaatcaagagaaccgtggccgctccttccgtgttcatcttcccaccttccgacgagcagctgaagtccggcacagcttctgtcgtgtgcctgctgaacaacttctaccctcgggaagccaaggtgcagtggaaggtggacaatgccctgcagtccggcaactcccaagagtctgtgaccgagcaggactccaaggacagcacctacagcctgtccagcacactgaccctgtccaaggccgactacgagaagcacaaggtgtacgcctgcgaagtgacccatcagggcctgtctagccctgtgaccaagtctttcaaccggggcgagtgctgatga

SEQ ID NO: 34 - DNA, 1398 bp, Artificial Sequence
  source: /note="Description of Artificial Sequence: Synthetic polynucleotide"
atggaaaccgacacactgctgctgtgggtgctgctcttgtgggtgccaggatctacaggcgaagtgcagctggttcagtctggcgccgaagtgaagaaacctggcgcctctgtgaaggtgtcctgcaaggcttctggctacacctttaccggctaccacatgcactgggtccgacaggctccaggacaaggcttggaatggatgggctggatcaaccccaactccggcgtgaccaaatacgcccagaaattccagggcagagtgaccatgaccagagacacctccatcaacaccgcctacatggaactgtcccggctgagattcgacgacaccgacgtgtactactgtgccaccggcggctttggctattggggagagggaacactggtcaccgtgtcctccgcttctaccaagggaccctccgtgtttcctctggctccttccagcaagtctacctccggtggaacagctgctctgggctgcctggtcaaggactactttcctgagcctgtgaccgtgtcttggaactctggcgctctgacatccggcgtgcacacctttccagctgtgctgcaatcctccggcctgtactctctgtcctccgtcgtgaccgtgccttctagctctctgggcacccagacctacatctgcaatgtgaaccacaagccttccaacaccaaggtggacaagagagtggaacccaagtcctgcgacaagacccacacctgtcctccatgtcctgctccagaactgctcggcggaccttctgtgttcctgtttcctccaaagcctaaggacaccctgatgatctctcggacccctgaagtgacctgcgtggtggtggatgtgtctcacgaggacccagaagtgaagttcaattggtacgtggacggcgtggaagtgcacaacgccaagaccaagcctagagaggaacagtacaactccacctacagagtggtgtccgtgctgaccgtgctgcaccaggattggctgaacggcaaagagtacaagtgcaaggtgtccaacaaggccctgcctgctcctatcgaaaagaccatctccaaggccaagggccagcctagggaaccccaggtttacaccctgcctccatgccgggaagagatgaccaagaaccaggtgtccctgtggtgcctcgtgaagggcttctacccttccgatatcgccgtggaatgggagagcaatggccagcctgagaacaactacaagacaacccctcctgtgctggactccgacggctcattcttcctgtactccaagctgacagtggacaagtccagatggcagcagggcaacgtgttctcctgctccgtgatgcacgaggccctgcacaatcactacacacagaagtccctgtctctgtcccctggcaagtgatga

SEQ ID NO: 35 - DNA, 714 bp, Artificial Sequence
  source: /note="Description of Artificial Sequence: Synthetic polynucleotide"
atggaaaccgacacactgctgctgtgggtgctgctcttgtgggtgccaggatctacaggactgcccgtgttgacccagcctcctagcgtttccaagggcctgagacagaccgccacactgacctgtaccggcaactctaacaacgtgggcaatcagggcgctgcctggttgcagcagcatcagggacagcctccaaagctgctgtcctaccggaaccacaacagacctagcggcgtgtccgagcggttcagcccttctagatctggcgacacctccagcctgaccatcactggactgcagcctgaggacgaggccgactactattgtctggcctgggacagctccctgcgggcctttgtttttggcaccggcaccaagctgaccgtgctgggacaacctaaggccaatcctaccgtgacactgttccctccatcctccgaggaactgcaggccaacaaggctaccctcgtgtgcctgatctccgacttttaccctggcgctgtgaccgtggcctggaaggctgatggatctcctgtgaaggctggcgtggaaaccaccaagccttccaagcagtccaacaacaaatacgccgcctcctcctacctgtctctgacccctgaacagtggaagtcccaccggtcctacagctgccaagtgacccatgagggctccaccgtggaaaagaccgtggctcctaccgagtgctcctgatga

SEQ ID NO: 36 - DNA, 1428 bp, Artificial Sequence
  source: /note="Description of Artificial Sequence: Synthetic polynucleotide"
atggaaaccgacacactgctgctgtgggtgctgctcttgtgggtgccaggatctacaggacaggtgcagctggttcagtctggcgccgaagtgaagaaacctggcgcctctgtgaaggtgtcctgcaaggcttccggctacaccttctccagctactacatgcactgggtccgacaggcccctggacaaggattggagtggatgggcatcatcaacccctctggcggcaacacctcttacgcccagaaattccagggcagagtgaccatgaccagagacacctccaccagcaccgtgtacatggaactgtccagcctgagatccgaggacaccgccgtgtactactgtgccagaggcggataccagctgcctcacggtagagccagagccttcgatatgtggggccagggcacaatggtcaccgtgtcctctgcttccaccaagggaccctctgtgttccctctggctccttccagcaagtccacatccggtggaacagctgctctgggctgcctggtcaaggactactttcctgagcctgtgaccgtgtcttggaactctggcgctctgacatccggcgtgcacacatttccagctgtgctgcagtcctccggcctgtactctctgtcctctgtcgtgaccgtgccttccagctctctgggaacccagacctacatctgcaatgtgaaccacaagccttccaacaccaaggtggacaagagagtggaacccaagtcctgcgacaagacccacacctgtccaccatgtcctgctccagaactgctcggcggaccttccgtgttcctgtttcctccaaagcctaaggacaccctgatgatctctcggacccctgaagtgacctgcgtggtggtggatgtgtcccacgaggacccagaagtgaagttcaattggtacgtggacggcgtggaagtgcacaacgccaagaccaagcctagagaggaacagtacaactccacctacagagtggtgtccgtgctgaccgtgctgcaccaggattggctgaacggcaaagagtacaagtgcaaggtgtccaacaaggccctgcctgctcctatcgaaaagaccatctccaaggccaagggccagcctagggaaccccaggtttacaccctgcctccatgccgggaagagatgaccaagaaccaggtgtccctgtggtgcctcgtgaagggcttctacccttccgatatcgccgtggaatgggagagcaatggccagccagagaacaactacaagacaacccctcctgtgctggactccgacggctcattcttcctgtactccaagctgacagtggacaagtccagatggcagcagggcaacgtgttctcctgctccgtgatgcacgaggccctgcacaatcactacacacagaagtccctgtctctgtcccctggcaagtgatga

SEQ ID NO: 37 - DNA, 723 bp, Artificial Sequence
  source: /note="Description of Artificial Sequence: Synthetic polynucleotide"
atggaaaccgacacactgctgctgtgggtgctgctcttgtgggtgccaggatctaccggcgccatcagaatgacccagtctccactgagcctgcctgtgacattgggccagcctgcctctatctcctgcacctcctctcagtctctggtgtacagagatggcaccacctacctgaactggttccagcagaggcctggccagtctcctagacggctgatctacaaggtgtccaacagagactctggcgtgcccgacagattcaccggctctggctctggcaccacattcaccctgaccatctccagagtggaagccgaggacgtgggcatctactactgtatgcagggcacccactggcctctgacctttggccagggaacaaaggtggaaatcaagcggaccgtggccgctccttccgtgttcatcttcccaccttccgacgagcagctgaagtctggcacagcctctgtcgtgtgcctgctgaacaacttctaccctcgggaagccaaggtgcagtggaaggtggacaatgccctgcagtccggcaactcccaagagtctgtgaccgagcaggactccaaggacagcacctacagcctgtcctccacactgaccctgtccaaggccgactacgagaagcacaaggtgtacgcctgcgaagtgacccatcagggcctgtctagccctgtgaccaagtctttcaaccggggcgagtgctgatga

SEQ ID NO: 38 - DNA, 1392 bp, Artificial Sequence
  source: /note="Description of Artificial Sequence: Synthetic polynucleotide"
atggaaaccgacacactgctgctgtgggtgctgctcttgtgggtgccaggatctacaggcgaggtgcagctggttgaatctggcggaggattggttcagcctggcggctctctgagactgtcttgtgtggcctctggcttcaccttctccgactactggatgtcctgggtccgacaggctcctggcaaaggactggaatgggtcgccaacatcaagaaagacggctccgtgaactactacgtggactccgtgaagggcagattcaccatctctcgggacaacgccaagaactccctgtacctgcagatgaacagcctgagagccgaggacaccgccgtgtactactgcaccagattcgattactggggccagggcaccctggtcacagtgtcctctgcttctaccaagggacccagcgtgttccctctggctccttccagcaagtctacctctggcggaacagctgctctgggctgcctggtcaaggactactttcctgagcctgtgaccgtgtcctggaactctggcgctctgacatctggcgtgcacacctttccagctgtgctgcagtcctccggcctgtactctctgtcctctgtcgtgaccgtgccttccagctctctgggaacccagacctacatctgcaatgtgaaccacaagccttccaacaccaaggtggacaagagagtggaacccaagtcctgcgacaagacccacacctgtcctccatgtcctgctccagaactgctcggcggaccttccgtgttcctgtttcctccaaagcctaaggacaccctgatgatctctcggacccctgaagtgacctgcgtggtggtggatgtgtctcacgaggatcccgaagtgaagttcaattggtacgtggacggcgtggaagtgcacaatgccaagaccaagcctagagaggaacagtacaactccacctacagagtggtgtccgtgctgaccgtgctgcaccaggattggctgaacggcaaagagtacaagtgcaaggtgtccaacaaggccctgcctgctcctatcgaaaagaccatctccaaggccaagggccagcctagggaaccccaggtttacaccctgcctccatgccgggaagagatgaccaagaaccaggtgtccctgtggtgcctggttaagggcttctacccctccgatatcgccgtggaatgggagtctaatggccagccagagaacaactacaagacaacccctcctgtgctggactccgacggctcattcttcctgtactccaagctgacagtggacaagtccagatggcagcagggcaacgtgttctcctgctccgtgatgcacgaggccctgcacaatcactacacccagaagtccctgtctctgtcccctggcaagtgatga

SEQ ID NO: 39 - DNA, 714 bp, Artificial Sequence
  source: /note="Description of Artificial Sequence: Synthetic polynucleotide"
atggaaaccgacacactgctgctgtgggtgctgctcttgtgggtgccaggatctacaggacaggctggcttgacccagcctcctagcgtttccaagggcctgagacagaccgccacactgacctgtaccggcaactctaacaacgtgggcaatcagggcgctgcctggttgcagcagcatcagggacatcctccaaagctgctgttctaccggaacaacaacagagcctccggcatctccgagcggctgtctgcttctagatccggcaataccgccagcctgaccatcactggactgcagcctgaggacgaggccgactactattgcctgacctgggactcctctctgtccgtggtggtttttggcggaggcaccaagctgacagtgctgggacagcctaaggccaatcctaccgtgacactgttccctccatcctccgaggaactgcaggccaacaaggctaccctcgtgtgcctgatctccgacttttaccctggcgctgtgaccgtggcctggaaggctgatggatctcctgtgaaggctggcgtggaaaccaccaagccttccaagcagtccaacaacaaatacgccgcctcctcctacctgtctctgacccctgaacagtggaagtcccaccggtcctacagctgccaagtgacccatgagggctccaccgtggaaaagaccgtggctcctaccgagtgctcctgatga

SEQ ID NO: 40 - DNA, 1404 bp, Artificial Sequence
  source: /note="Description of Artificial Sequence: Synthetic polynucleotide"
atggaaaccgacacactgctgctgtgggtgctgctcttgtgggtgccaggatctacaggacaggtgcagctggttcagtctggcgccgaagtgaagaaacctggcgcctctgtgaaggtgtcctgcaaggcttccggctacacctttaccagctacgacatctcctgggtccgacaggctcctggacaaggcttggaatggatgggcgtgatctggaccgatggcggcaccaattacgcccagaaactgcagggcagagtgaccatgaccaccgacacctctacctccaccgcctacatggaactgcggtccctgagatctgacgacaccgccgtgtactactgcgccagagatcagcggctgtacttcgatgtgtggggccagggcacaaccgtgacagtgtcctctgcttccaccaagggacccagcgttttccctctggctccatcctccaagtctacctctggcggaacagctgctctgggctgcctggtcaaggactactttcctgagcctgtgaccgtgtcctggaactctggcgctctgacatctggcgtgcacacattccctgctgtgctgcagtcctccggcctgtactctctgtcctctgtggttaccgtgccttcctctagcctgggcacccagacctacatctgcaatgtgaaccacaagccttccaacaccaaggtggacaagagagtggaacccaagtcctgcgacaagacccacacctgtccaccatgtcctgctccagaactgctcggcggaccttccgtgttcctgtttcctccaaagcctaaggacaccctgatgatctctcggacccctgaagtgacctgcgtggtggtggatgtgtctcacgaggacccagaagtgaagttcaattggtacgtggacggcgtggaagtgcacaacgccaagaccaagcctagagaggaacagtacaactccacctacagagtggtgtccgtgctgaccgtgctgcaccaggattggctgaacggcaaagagtacaagtgcaaggtgtccaacaaggccctgcctgctcctatcgaaaagaccatctccaaggccaagggccagcctcgggaacctcaagtctgtaccctgcctcctagccgggaagagatgaccaagaaccaggtgtccctgagctgcgccgtgaagggcttctacccttctgatatcgccgtggaatgggagagcaacggccagcctgagaacaactacaagacaacccctcctgtgctggactccgacggctcattcttcctggtgtccaagctgacagtggacaagtccagatggcagcagggcaacgtgttctcctgctccgtgatgcacgaggccctgcacaatcactacacacagaagtccctgtctctgtcccctggcaagtgatga

SEQ ID NO: 41 - DNA, 705 bp, Artificial Sequence
  source: /note="Description of Artificial Sequence: Synthetic polynucleotide"
atggaaaccgacacactgctgctgtgggtgctgctcttgtgggtgccaggatctaccggcgacatccagatgacccagtctccatcctctctgtccgcctctgtgggcgacagagtgaccatcacctgtagagcctccgaggacgtgaacacctacgtgtcctggtatcagcagaagcccggcaaggctcccaagctgctgatctacgccgcctctaacagatacaccggcgtgccctctagattctccggctctggctctggcaccgactttaccctgacaatctccagcctgcagcctgaggacttcgccacctactactgccagcagtccttcagctaccccacctttggccagggcaccaagctggaaatcaagcggacagtggccgctccttccgtgttcatcttcccaccttccgacgagcagctgaagtccggcacagcttctgtcgtgtgcctgctgaacaacttctaccctcgggaagccaaggtgcagtggaaggtggacaatgccctgcagtccggcaactcccaagagtctgtgaccgagcaggactccaaggacagcacctacagcctgtcctccacactgaccctgtccaaggccgactacgagaagcacaaggtgtacgcctgcgaagtgacccatcagggcctgtctagccctgtgaccaagtctttcaaccggggcgagtgctgatga

SEQ ID NO: 42 - DNA, 1422 bp, Artificial Sequence
  source: /note="Description of Artificial Sequence: Synthetic polynucleotide"
atggaaaccgacacactgctgctgtgggtgctgctcttgtgggtgccaggatctacaggacaggtgcagctggttcagtctggcgccgaagtgaagaaacctggctcctccgtgaaggtgtcctgcaaggcttctggctacacctttaccgacaactacatgatctgggtccgacaggctcctggacagggacttgagtggatgggcgacatcaacccttacaacggcggcaccaccttcaaccagaaattcaagggcagagtgaccatcaccgccgacaagtctacctccaccgcctacatggaactgtccagcctgagatctgaggacaccgccgtgtactactgcgccagagagtccccttacttctccaacctgtacgtgatggactactggggccagggcacactggtcacagtgtcctctgcttccaccaagggacccagcgttttccctctggctccatcctccaagtccacctctggtggaacagctgctctgggctgcctggtcaaggactactttcctgagcctgtgaccgtgtcctggaactctggcgctctgacatctggcgtgcacacctttccagctgtgctgcagtcctccggcctgtactctctgtcctctgtcgtgaccgtgccttccagctctctgggaacccagacctacatctgcaatgtgaaccacaagccttccaacaccaaggtcgacaagagagtggaacccaagtcctgcgacaagacccacacctgtccaccttgtcctgctccagaactgctcggcggaccttccgtgttcctgtttcctccaaagcctaaggacaccctgatgatctctcggacccctgaagtgacctgcgtggtggtggatgtgtctcacgaggacccagaagtgaagttcaattggtacgtggacggcgtggaagtgcacaacgccaagaccaagcctagagaggaacagtacaactccacctacagagtggtgtccgtgctgaccgtgctgcaccaggattggctgaacggcaaagagtacaagtgcaaggtgtccaacaaggccctgcctgctcctatcgaaaagaccatctccaaggccaagggccagcctcgggaacctcaagtctgtaccctgcctcctagccgggaagagatgaccaagaaccaggtgtccctgagctgcgccgtgaagggcttctacccttctgatatcgccgtggaatgggagagcaacggccagccagagaacaactacaagacaacccctcctgtgctggactccgacggctcattcttcctggtgtccaagctgacagtggacaagtccagatggcagcagggcaacgtgttctcctgctccgtgatgcacgaggccctgcacaatcactacacacagaagtctctgtctctgagccccggcaagtgatga

SEQ ID NO: 43 - DNA, 720 bp, Artificial Sequence
  source: /note="Description of Artificial Sequence: Synthetic polynucleotide"
atggaaaccgacacactgctgctgtgggtgctgctcttgtgggtgccaggatctacaggcgagatcgtgctgacccagtctcctgccacactgtcactgtctccaggcgagagagctaccctgtcctgcaaggcttctcagtccgtggactacgacggcgacaactacatgaactggtatcagcagaagcccggccaggctcctagactgctgatctacgccgcctccaacctggaatctggcatccccgctagattctccggctctggctctggcacagactttaccctgaccatctccagcctggaacctgaggacttcgccgtgtactactgccacctgtccaacgaggacctgtccacatttggcggaggcaccaaggtggaaatcaagcggacagtggccgctccttccgtgttcatcttcccaccttccgacgagcagctgaagtctggcaccgcttctgtcgtgtgcctgctgaacaacttctaccctcgggaagccaaggtgcagtggaaggtggacaatgccctgcagtccggcaactcccaagagtctgtgaccgagcaggactccaaggacagcacctacagcctgtcctccacactgaccctgtccaaggccgactacgagaagcacaaggtgtacgcctgcgaagtgacccatcagggcctgtctagccctgtgaccaagtctttcaaccggggcgagtgctgatga

SEQ ID NO: 44 - protein, 116 aa, Artificial Sequence
  source: /note="Description of Artificial Sequence: Synthetic polypeptide"
QVQLQESGPGLVQPSQTLSLTCTVSGFSLTDFSVHWVRQPPGKGLEWMGRIRSEGNTDYNSALKSRLSISRDTSKSQVFLKMNSLQTEDTAIYFCTRGDILGFGYWGQGVMVTVSS

SEQ ID NO: 45 - protein, 112 aa, Artificial Sequence
  source: /note="Description of Artificial Sequence: Synthetic polypeptide"
DIVMTQSPLSVSVTPGESASISCRSSKSLLHFKGITFVYWYLQKPGQSPQLLIFRMSSLASGVPDRFSGSGSETDFTLKISRVEAEDVGTYYCGQLLENPYTFGAGTKLELK

SEQ ID NO: 46 - protein, 98 aa, Artificial Sequence
  source: /note="Description of Artificial Sequence: Synthetic polypeptide"
AQTTAPSVYPLAPGCGDTTSSTVTLGCLVKGYFPEPVTVTWNSGALSSDVHTFPAVLQSGLYTLTSSVTSSTWPSQTVTCNVAHPASSTKVDKKVERR

SEQ ID NO: 47 - protein, 107 aa, Artificial Sequence
  source: /note="Description of Artificial Sequence: Synthetic polypeptide"
RADAAPTVSIFPPSMEQLTSGGATVVCFVNNFYPRDISVKWKIDGSEQRDGVLDSVTDQDSKDSTYSMSSTLSLTKVEYERHNLYTCEVVHKTSSSPVVKSFNRNEC

SEQ ID NO: 48 - protein, 118 aa, Artificial Sequence
  source: /note="Description of Artificial Sequence: Synthetic polypeptide"
QVQLQQSGAELVKPGSSVKISCKASGYTFTSNFMHWIKQQPGNGLEWIGWIYPGDGDTEYNQKFNGKATLTADKSSSTAYMQLSSLTSEDSAVYFCAVNYGGYVLDAWGQGASVTVSS

SEQ ID NO: 49 - protein, 103 aa, Artificial Sequence
  source: /note="Description of Artificial Sequence: Synthetic polypeptide"
AETTAPSVYPLAPGTALKSNSMVTLGCLVKGYFPEPVTVTWNSGALSSGVHTFPAVLQSGLYTLTSSVTVPSSTWSSQAVTCNVAHPASSTKVDKKIVPRECN

SEQ ID NO: 50 - protein, 106 aa, Artificial Sequence
  source: /note="Description of Artificial Sequence: Synthetic polypeptide"
EIVLTQSPTTMAASPGEKVTITCRASSSTNYMSWYQQKSGASPKPWIYETSKLASGVPDRFSGSGSGTSYSFTISSMETEDAATYYCHQWSSTPLTFGSGTKLEIK

SEQ ID NO: 51 - protein, 107 aa, Artificial Sequence; identical to SEQ ID NO: 47
  source: /note="Description of Artificial Sequence: Synthetic polypeptide"

SEQ ID NO: 52 - protein, 228 aa, Artificial Sequence
  source: /note="Description of Artificial Sequence: Synthetic polypeptide"
TIKPCPPCKCPAPNLLGGPSVFIFPPKIKDVLMISLSPIVTCVVVDVSEDDPDVQISWFVNNVEVHTAQTQTHREDYNSTLRVVSALPIQHQDWMSGKEFKCKVNNKDLPAPIERTISKPKGSVRAPQVYVLPPCEEEMTKKQVTLWCMVTDFMPEDIYVEWTNNGKTELNYKNTEPVLDSDGSYFMYSKLRVEKKNWVERNSYSCSVVHEGLHNHHTTKSFSRTPGK

SEQ ID NO: 53 - protein, 228 aa, Artificial Sequence
  source: /note="Description of Artificial Sequence: Synthetic polypeptide"
TIKPCPPCKCPAPNLLGGPSVFIFPPKIKDVLMISLSPIVTCVVVDVSEDDPDVQISWFVNNVEVHTAQTQTHREDYNSTLRVVSALPIQHQDWMSGKEFKCKVNNKDLPAPIERTISKPKGSVRAPQVCVLPPPEEEMTKKQVTLSCAVTDFMPEDIYVEWTNNGKTELNYKNTEPVLDSDGSYFMVSKLRVEKKNWVERNSYSCSVVHEGLHNHHTTKSFSRTPGK

SEQ ID NO: 54 - protein, 117 aa, Artificial Sequence
  source: /note="Description of Artificial Sequence: Synthetic polypeptide"
EVQLVESGGGLVKPGGSLRLSCAASGFTFSAYAMNWVRQAPGKGLEWVGRIRTKNNNYATYYADSVKDRFTISRDDSKNTLYLQMNSLKTEDTAVYYCTTFYGNGVWGQGTLVTVSS

SEQ ID NO: 55 - protein, 103 aa, Artificial Sequence
  source: /note="Description of Artificial Sequence: Synthetic polypeptide"
ASTKGPSVFPLAPSSKSTSGGTAALGCLVKDYFPEPVTVSWNSGALTSGVHTFPAVLQSSGLYSLSSVVTVPSSSLGTQTYICNVNHKPSNTKVDKRVEPKSC

SEQ ID NO: 56 - protein, 227 aa, Artificial Sequence
  source: /note="Description of Artificial Sequence: Synthetic polypeptide"
  VARIANT (227)..(227): /replace=" "
  SITE (1)..(227): /note="Variant residues given in the sequence have no preference with respect to those in the annotations for variant positions"
DKTHTCPPCPAPELLGGPSVFLFPPKPKDTLMISRTPEVTCVVVDVSHEDPEVKFNWYVDGVEVHNAKTKPREEQYNSTYRVVSVLTVLHQDWLNGKEYKCKVSNKALPAPIEKTISKAKGQPREPQVYTLPPCREEMTKNQVSLWCLVKGFYPSDIAVEWESNGQPENNYKTTPPVLDSDGSFFLYSKLTVDKSRWQQGNVFSCSVMHEALHNHYTQKSLSLSPGK

SEQ ID NO: 57 - protein, 112 aa, Artificial Sequence
  source: /note="Description of Artificial Sequence: Synthetic polypeptide"
DVVMTQSPLSLPVTLGQPASISCKSSQSLLDSDGKTFLNWFQQRPGQSPRRLIYLVSKLDSGVPDRFSGSGSGTDFTLKISRVEAEDVGVYYCWQGTHFPYTFGQGTRLEIK

SEQ ID NO: 58 - protein, 107 aa, Artificial Sequence [sequence omitted]

SEQ ID NO: 59 - protein, 114 aa, Artificial Sequence
  source: /note="Description of Artificial Sequence: Synthetic polypeptide"
EVQLVQSGAEVKKPGASVKVSCKASGYTFTGYHMHWVRQAPGQGLEWMGWINPNSGVTKYAQKFQGRVTMTRDTSINTAYMELSRLRFDDTDVYYCATGGFGYWGEGTLVTVSS

SEQ ID NO: 60 - protein, 110 aa, Artificial Sequence
  source: /note="Description of Artificial Sequence: Synthetic polypeptide"
LPVLTQPPSVSKGLRQTATLTCTGNSNNVGNQGAAWLQQHQGQPPKLLSYRNHNRPSGVSERFSPSRSGDTSSLTITGLQPEDEADYYCLAWDSSLRAFVFGTGTKLTVL

SEQ ID NO: 61 - protein, 106 aa, Artificial Sequence
  source: /note="Description of Artificial Sequence: Synthetic polypeptide"
GQPKANPTVTLFPPSSEELQANKATLVCLISDFYPGAVTVAWKADGSPVKAGVETTKPSKQSNNKYAASSYLSLTPEQWKSHRSYSCQVTHEGSTVEKTVAPTECS

SEQ ID NO: 62 - protein, 124 aa, Artificial Sequence
  source: /note="Description of Artificial Sequence: Synthetic polypeptide"
QVQLVQSGAEVKKPGASVKVSCKASGYTFSSYYMHWVRQAPGQGLEWMGIINPSGGNTSYAQKFQGRVTMTRDTSTSTVYMELSSLRSEDTAVYYCARGGYQLPHGRARAFDMWGQGTMVTVSS

SEQ ID NO: 63 - protein, 112 aa, Artificial Sequence
  source: /note="Description of Artificial Sequence: Synthetic polypeptide"
AIRMTQSPLSLPVTLGQPASISCTSSQSLVYRDGTTYLNWFQQRPGQSPRRLIYKVSNRDSGVPDRFTGSGSGTTFTLTISRVEAEDVGIYYCMQGTHWPLTFGQGTKVEIK

SEQ ID NO: 64 - protein, 112 aa, Artificial Sequence
  source: /note="Description of Artificial Sequence: Synthetic polypeptide"
EVQLVESGGGLVQPGGSLRLSCVASGFTFSDYWMSWVRQAPGKGLEWVANIKKDGSVNYYVDSVKGRFTISRDNAKNSLYLQMNSLRAEDTAVYYCTRFDYWGQGTLVTVSS

SEQ ID NO: 65 - protein, 110 aa, Artificial Sequence
  source: /note="Description of Artificial Sequence: Synthetic polypeptide"
QAGLTQPPSVSKGLRQTATLTCTGNSNNVGNQGAAWLQQHQGHPPKLLFYRNNNRASGISERLSASRSGNTASLTITGLQPEDEADYYCLTWDSSLSVVVFGGGTKLTVL

SEQ ID NO: 66 - protein, 116 aa, Artificial Sequence
  source: /note="Description of Artificial Sequence: Synthetic polypeptide"
QVQLVQSGAEVKKPGASVKVSCKASGYTFTSYDISWVRQAPGQGLEWMGVIWTDGGTNYAQKLQGRVTMTTDTSTSTAYMELRSLRSDDTAVYYCARDQRLYFDVWGQGTTVTVSS

SEQ ID NO: 67 - protein, 106 aa, Artificial Sequence
  source: /note="Description of Artificial Sequence: Synthetic polypeptide"
DIQMTQSPSSLSASVGDRVTITCRASEDVNTYVSWYQQKPGKAPKLLIYAASNRYTGVPSRFSGSGSGTDFTLTISSLQPEDFATYYCQQSFSYPTFGQGTKLEIK

SEQ ID NO: 68 - protein, 227 aa, Artificial Sequence
  source: /note="Description of Artificial Sequence: Synthetic polypeptide"
  VARIANT (227)..(227): /replace=" "
  SITE (1)..(227): /note="Variant residues given in the sequence have no preference with respect to those in the annotations for variant positions"
DKTHTCPPCPAPELLGGPSVFLFPPKPKDTLMISRTPEVTCVVVDVSHEDPEVKFNWYVDGVEVHNAKTKPREEQYNSTYRVVSVLTVLHQDWLNGKEYKCKVSNKALPAPIEKTISKAKGQPREPQVCTLPPSREEMTKNQVSLSCAVKGFYPSDIAVEWESNGQPENNYKTTPPVLDSDGSFFLVSKLTVDKSRWQQGNVFSCSVMHEALHNHYTQKSLSLSPGK

SEQ ID NO: 69 - protein, 122 aa, Artificial Sequence
  source: /note="Description of Artificial Sequence: Synthetic polypeptide"
QVQLVQSGAEVKKPGSSVKVSCKASGYTFTDNYMIWVRQAPGQGLEWMGDINPYNGGTTFNQKFKGRVTITADKSTSTAYMELSSLRSEDTAVYYCARESPYFSNLYVMDYWGQGTLVTVSS

SEQ ID NO: 70 - protein, 111 aa, Artificial Sequence
  source: /note="Description of Artificial Sequence: Synthetic polypeptide"
EIVLTQSPATLSLSPGERATLSCKASQSVDYDGDNYMNWYQQKPGQAPRLLIYAASNLESGIPARFSGSGSGTDFTLTISSLEPEDFAVYYCHLSNEDLSTFGGGTKVEIK

SEQ ID NO: 71 - protein, 442 aa, Artificial Sequence
  source: /note="Description of Artificial Sequence: Synthetic polypeptide"
QVQLQESGPGLVQPSQTLSLTCTVSGFSLTDFSVHWVRQPPGKGLEWMGRIRSEGNTDYNSALKSRLSISRDTSKSQVFLKMNSLQTEDTAIYFCTRGDILGFGYWGQGVMVTVSSAQTTAPSVYPLAPGCGDTTSSTVTLGCLVKGYFPEPVTVTWNSGALSSDVHTFPAVLQSGLYTLTSSVTSSTWPSQTVTCNVAHPASSTKVDKKVERRTIKPCPPCKCPAPNLLGGPSVFIFPPKIKDVLMISLSPIVTCVVVDVSEDDPDVQISWFVNNVEVHTAQTQTHREDYNSTLRVVSALPIQHQDWMSGKEFKCKVNNKDLPAPIERTISKPKGSVRAPQVYVLPPCEEEMTKKQVTLWCMVTDFMPEDIYVEWTNNGKTELNYKNTEPVLDSDGSYFMYSKLRVEKKNWVERNSYSCSVVHEGLHNHHTTKSFSRTPGK

SEQ ID NO: 72 - protein, 219 aa, Artificial Sequence
  source: /note="Description of Artificial Sequence: Synthetic polypeptide"
DIVMTQSPLSVSVTPGESASISCRSSKSLLHFKGITFVYWYLQKPGQSPQLLIFRMSSLASGVPDRFSGSGSETDFTLKISRVEAEDVGTYYCGQLLENPYTFGAGTKLELKRADAAPTVSIFPPSMEQLTSGGATVVCFVNNFYPRDISVKWKIDGSEQRDGVLDSVTDQDSKDSTYSMSSTLSLTKVEYERHNLYTCEVVHKTSSSPVVKSFNRNEC

SEQ ID NO: 73 - protein, 449 aa, Artificial Sequence
  source: /note="Description of Artificial Sequence: Synthetic polypeptide"
QVQLQQSGAELVKPGSSVKISCKASGYTFTSNFMHWIKQQPGNGLEWIGWIYPGDGDTEYNQKFNGKATLTADKSSSTAYMQLSSLTSEDSAVYFCAVNYGGYVLDAWGQGASVTVSSAETTAPSVYPLAPGTALKSNSMVTLGCLVKGYFPEPVTVTWNSGALSSGVHTFPAVLQSGLYTLTSSVTVPSSTWSSQAVTCNVAHPASSTKVDKKIVPRECNTIKPCPPCKCPAPNLLGGPSVFIFPPKIKDVLMISLSPIVTCVVVDVSEDDPDVQISWFVNNVEVHTAQTQTHREDYNSTLRVVSALPIQHQDWMSGKEFKCKVNNKDLPAPIERTISKPKGSVRAPQVCVLPPPEEEMTKKQVTLSCAVTDFMPEDIYVEWTNNGKTELNYKNTEPVLDSDGSYFMVSKLRVEKKNWVERNSYSCSVVHEGLHNHHTTKSFSRTPGK

SEQ ID NO: 74 - protein, 213 aa, Artificial Sequence
  source: /note="Description of Artificial Sequence: Synthetic polypeptide"
EIVLTQSPTTMAASPGEKVTITCRASSSTNYMSWYQQKSGASPKPWIYETSKLASGVPDRFSGSGSGTSYSFTISSMETEDAATYYCHQWSSTPLTFGSGTKLEIKRADAAPTVSIFPPSMEQLTSGGATVVCFVNNFYPRDISVKWKIDGSEQRDGVLDSVTDQDSKDSTYSMSSTLSLTKVEYERHNLYTCEVVHKTSSSPVVKSFNRNEC

SEQ ID NO: 75 - protein, 447 aa, Artificial Sequence
  source: /note="Description of Artificial Sequence: Synthetic polypeptide"
  VARIANT (447)..(447): /replace=" "
  SITE (1)..(447): /note="Variant residues given in the sequence have no preference with respect to those in the annotations for variant positions"
EVQLVESGGGLVKPGGSLRLSCAASGFTFSAYAMNWVRQAPGKGLEWVGRIRTKNNNYATYYADSVKDRFTISRDDSKNTLYLQMNSLKTEDTAVYYCTTFYGNGVWGQGTLVTVSSASTKGPSVFPLAPSSKSTSGGTAALGCLVKDYFPEPVTVSWNSGALTSGVHTFPAVLQSSGLYSLSSVVTVPSSSLGTQTYICNVNHKPSNTKVDKRVEPKSCDKTHTCPPCPAPELLGGPSVFLFPPKPKDTLMISRTPEVTCVVVDVSHEDPEVKFNWYVDGVEVHNAKTKPREEQYNSTYRVVSVLTVLHQDWLNGKEYKCKVSNKALPAPIEKTISKAKGQPREPQVYTLPPCREEMTKNQVSLWCLVKGFYPSDIAVEWESNGQPENNYKTTPPVLDSDGSFFLYSKLTVDKSRWQQGNVFSCSVMHEALHNHYTQKSLSLSPGK

SEQ ID NO: 76 - protein, 219 aa, Artificial Sequence
  source: /note="Description of Artificial Sequence: Synthetic polypeptide"
DVVMTQSPLSLPVTLGQPASISCKSSQSLLDSDGKTFLNWFQQRPGQSPRRLIYLVSKLDSGVPDRFSGSGSGTDFTLKISRVEAEDVGVYYCWQGTHFPYTFGQGTRLEIKRTVAAPSVFIFPPSDEQLKSGTASVVCLLNNFYPREAKVQWKVDNALQSGNSQESVTEQDSKDSTYSLSSTLTLSKADYEKHKVYACEVTHQGLSSPVTKSFNRGEC

SEQ ID NO: 77 - protein, 444 aa, Artificial Sequence
  source: /note="Description of Artificial Sequence: Synthetic polypeptide"
  VARIANT (444)..(444): /replace=" "
  SITE (1)..(444): /note="Variant residues given in the sequence have no preference with respect to those in the annotations for variant positions"
EVQLVQSGAEVKKPGASVKVSCKASGYTFTGYHMHWVRQAPGQGLEWMGWINPNSGVTKYAQKFQGRVTMTRDTSINTAYMELSRLRFDDTDVYYCATGGFGYWGEGTLVTVSSASTKGPSVFPLAPSSKSTSGGTAALGCLVKDYFPEPVTVSWNSGALTSGVHTFPAVLQSSGLYSLSSVVTVPSSSLGTQTYICNVNHKPSNTKVDKRVEPKSCDKTHTCPPCPAPELLGGPSVFLFPPKPKDTLMISRTPEVTCVVVDVSHEDPEVKFNWYVDGVEVHNAKTKPREEQYNSTYRVVSVLTVLHQDWLNGKEYKCKVSNKALPAPIEKTISKAKGQPREPQVYTLPPCREEMTKNQVSLWCLVKGFYPSDIAVEWESNGQPENNYKTTPPVLDSDGSFFLYSKLTVDKSRWQQGNVFSCSVMHEALHNHYTQKSLSLSPGK

SEQ ID NO: 78 - protein, 216 aa, Artificial Sequence
  source: /note="Description of Artificial Sequence: Synthetic polypeptide"
LPVLTQPPSVSKGLRQTATLTCTGNSNNVGNQGAAWLQQHQGQPPKLLSYRNHNRPSGVSERFSPSRSGDTSSLTITGLQPEDEADYYCLAWDSSLRAFVFGTGTKLTVLGQPKANPTVTLFPPSSEELQANKATLVCLISDFYPGAVTVAWKADGSPVKAGVETTKPSKQSNNKYAASSYLSLTPEQWKSHRSYSCQVTHEGSTVEKTVAPTECS

SEQ ID NO: 79 - protein, 454 aa, Artificial Sequence
  source: /note="Description of Artificial Sequence: Synthetic polypeptide"
  VARIANT (454)..(454): /replace=" "
  SITE (1)..(454): /note="Variant residues given in the sequence have no preference with respect to those in the annotations for variant positions"
QVQLVQSGAEVKKPGASVKVSCKASGYTFSSYYMHWVRQAPGQGLEWMGIINPSGGNTSYAQKFQGRVTMTRDTSTSTVYMELSSLRSEDTAVYYCARGGYQLPHGRARAFDMWGQGTMVTVSSASTKGPSVFPLAPSSKSTSGGTAALGCLVKDYFPEPVTVSWNSGALTSGVHTFPAVLQSSGLYSLSSVVTVPSSSLGTQTYICNVNHKPSNTKVDKRVEPKSCDKTHTCPPCPAPELLGGPSVFLFPPKPKDTLMISRTPEVTCVVVDVSHEDPEVKFNWYVDGVEVHNAKTKPREEQYNSTYRVVSVLTVLHQDWLNGKEYKCKVSNKALPAPIEKTISKAKGQPREPQVYTLPPCREEMTKNQVSLWCLVKGFYPSDIAVEWESNGQPENNYKTTPPVLDSDGSFFLYSKLTVDKSRWQQGNVFSCSVMHEALHNHYTQKSLSLSPGK

SEQ ID NO: 80 - protein, 219 aa, Artificial Sequence
  source: /note="Description of Artificial Sequence: Synthetic polypeptide"
AIRMTQSPLSLPVTLGQPASISCTSSQSLVYRDGTTYLNWFQQRPGQSPRRLIYKVSNRDSGVPDRFTGSGSGTTFTLTISRVEAEDVGIYYCMQGTHWPLTFGQGTKVEIKRTVAAPSVFIFPPSDEQLKSGTASVVCLLNNFYPREAKVQWKVDNALQSGNSQESVTEQDSKDSTYSLSSTLTLSKADYEKHKVYACEVTHQGLSSPVTKSFNRGEC

SEQ ID NO: 81 - protein, 442 aa, Artificial Sequence
  source: /note="Description of Artificial Sequence: Synthetic polypeptide"
  VARIANT (442)..(442): /replace=" "
  SITE (1)..(442): /note="Variant residues given in the sequence have no preference with respect to those in the annotations for variant positions"
EVQLVESGGGLVQPGGSLRLSCVASGFTFSDYWMSWVRQAPGKGLEWVANIKKDGSVNYYVDSVKGRFTISRDNAKNSLYLQMNSLRAEDTAVYYCTRFDYWGQGTLVTVSSASTKGPSVFPLAPSSKSTSGGTAALGCLVKDYFPEPVTVSWNSGALTSGVHTFPAVLQSSGLYSLSSVVTVPSSSLGTQTYICNVNHKPSNTKVDKRVEPKSCDKTHTCPPCPAPELLGGPSVFLFPPKPKDTLMISRTPEVTCVVVDVSHEDPEVKFNWYVDGVEVHNAKTKPREEQYNSTYRVVSVLTVLHQDWLNGKEYKCKVSNKALPAPIEKTISKAKGQPREPQVYTLPPCREEMTKNQVSLWCLVKGFYPSDIAVEWESNGQPENNYKTTPPVLDSDGSFFLYSKLTVDKSRWQQGNVFSCSVMHEALHNHYTQKSLSLSPGK

SEQ ID NO: 82 - protein, 216 aa, Artificial Sequence
  source: /note="Description of Artificial Sequence: Synthetic polypeptide"
QAGLTQPPSVSKGLRQTATLTCTGNSNNVGNQGAAWLQQHQGHPPKLLFYRNNNRASGISERLSASRSGNTASLTITGLQPEDEADYYCLTWDSSLSVVVFGGGTKLTVLGQPKANPTVTLFPPSSEELQANKATLVCLISDFYPGAVTVAWKADGSPVKAGVETTKPSKQSNNKYAASSYLSLTPEQWKSHRSYSCQVTHEGSTVEKTVAPTECS

SEQ ID NO: 83 - protein, 446 aa, Artificial Sequence
  source: /note="Description of Artificial Sequence: Synthetic polypeptide"
  VARIANT (446)..(446): /replace=" "
  SITE (1)..(446): /note="Variant residues given in the sequence have no preference with respect to those in the annotations for variant positions"
QVQLVQSGAEVKKPGASVKVSCKASGYTFTSYDISWVRQAPGQGLEWMGVIWTDGGTNYAQKLQGRVTMTTDTSTSTAYMELRSLRSDDTAVYYCARDQRLYFDVWGQGTTVTVSSASTKGPSVFPLAPSSKSTSGGTAALGCLVKDYFPEPVTVSWNSGALTSGVHTFPAVLQSSGLYSLSSVVTVPSSSLGTQTYICNVNHKPSNTKVDKRVEPKSCDKTHTCPPCPAPELLGGPSVFLFPPKPKDTLMISRTPEVTCVVVDVSHEDPEVKFNWYVDGVEVHNAKTKPREEQYNSTYRVVSVLTVLHQDWLNGKEYKCKVSNKALPAPIEKTISKAKGQPREPQVCTLPPSREEMTKNQVSLSCAVKGFYPSDIAVEWESNGQPENNYKTTPPVLDSDGSFFLVSKLTVDKSRWQQGNVFSCSVMHEALHNHYTQKSLSLSPGK

SEQ ID NO: 84 - protein, 213 aa, Artificial Sequence
  source: /note="Description of Artificial Sequence: Synthetic polypeptide"
DIQMTQSPSSLSASVGDRVTITCRASEDVNTYVSWYQQKPGKAPKLLIYAASNRYTGVPSRFSGSGSGTDFTLTISSLQPEDFATYYCQQSFSYPTFGQGTKLEIKRTVAAPSVFIFPPSDEQLKSGTASVVCLLNNFYPREAKVQWKVDNALQSGNSQESVTEQDSKDSTYSLSSTLTLSKADYEKHKVYACEVTHQGLSSPVTKSFNRGEC

SEQ ID NO: 85 - protein, 452 aa, Artificial Sequence
  source: /note="Description of Artificial Sequence: Synthetic polypeptide"
  VARIANT (452)..(452): /replace=" "
  SITE (1)..(452): /note="Variant residues given in the sequence have no preference with respect to those in the annotations for variant positions"
QVQLVQSGAEVKKPGSSVKVSCKASGYTFTDNYMIWVRQAPGQGLEWMGDINPYNGGTTFNQKFKGRVTITADKSTSTAYMELSSLRSEDTAVYYCARESPYFSNLYVMDYWGQGTLVTVSSASTKGPSVFPLAPSSKSTSGGTAALGCLVKDYFPEPVTVSWNSGALTSGVHTFPAVLQSSGLYSLSSVVTVPSSSLGTQTYICNVNHKPSNTKVDKRVEPKSCDKTHTCPPCPAPELLGGPSVFLFPPKPKDTLMISRTPEVTCVVVDVSHEDPEVKFNWYVDGVEVHNAKTKPREEQYNSTYRVVSVLTVLHQDWLNGKEYKCKVSNKALPAPIEKTISKAKGQPREPQVCTLPPSREEMTKNQVSLSCAVKGFYPSDIAVEWESNGQPENNYKTTPPVLDSDGSFFLVSKLTVDKSRWQQGNVFSCSVMHEALHNHYTQKSLSLSPGK

SEQ ID NO: 86 - protein, 218 aa, Artificial Sequence
  source: /note="Description of Artificial Sequence: Synthetic polypeptide"
EIVLTQSPATLSLSPGERATLSCKASQSVDYDGDNYMNWYQQKPGQAPRLLIYAASNLESGIPARFSGSGSGTDFTLTISSLEPEDFAVYYCHLSNEDLSTFGGGTKVEIKRTVAAPSVFIFPPSDEQLKSGTASVVCLLNNFYPREAKVQWKVDNALQSGNSQESVTEQDSKDSTYSLSSTLTLSKADYEKHKVYACEVTHQGLSSPVTKSFNRGEC

SEQ ID NO: 87 - protein, 972 aa, Homo sapiens
MGPGVLLLLLVATAWHGQGIPVIEPSVPELVVKPGATVTLRCVGNGSVEWDGPPSPHWTLYSDGSSSILSTNNATFQNTGTYRCTEPGDPLGGSAAIHLYVKDPARPWNVLAQEVVVFEDQDALLPCLLTDPVLEAGVSLVRVRGRPLMRHTNYSFSPWHGFTIHRAKFIQSQDYQCSALMGGRKVMSISIRLKVQKVIPGPPALTLVPAELVRIRGEAAQIVCSASSVDVNFDVFLQHNNTKLAIPQQSDFHNNRYQKVLTLNLDQVDFQHAGNYSCVASNVQGKHSTSMFFRVVESAYLNLSSEQNLIQEVTVGEGLNLKVMVEAYPGLQGFNWTYLGPFSDHQPEPKLANATTKDTYRHTFTLSLPRLKPSEAGRYSFLARNPGGWRALTFELTLRYPPEVSVIWTFINGSGTLLCAASGYPQPNVTWLQCSGHTDRCDEAQVLQVWDDPYPEVLSQEPFHKVTVQSLLTVETLEHNQTYECRAHNSVGSGSWAFIPISAGAHTHPPDEFLFTPVVVACMSIMALLLLLLLLLLYKYKQKPKYQVRWKIIESYEGNSYTFIDPTQLPYNEKWEFPRNNLQFGKTLGAGAFGKVVEATAFGLGKEDAVLKVAVKMLKSTAHADEKEALMSELKIMSHLGQHENIVNLLGACTHGGPVLVITEYCCYGDLLNFLRRKAEAMLGPSLSPGQDPEGGVDYKNIHLEKKYVRRDSGFSSQGVDTYVEMRPVSTSSNDSFSEQDLDKEDGRPLELRDLLHFSSQVAQGMAFLASKNCIHRDVAARNVLLTNGHVAKIGDFGLARDIMNDSNYIVKGNARLPVKWMAPESIFDCVYTVQSDVWSYGILLWEIFSLGLNPYPGILVNSKFYKLVKDGYQMAQPAFAPKNIYSIMQACWALEPTHRPTFQQICSFLQEQAQEDRRERDYTNLPSSSRSGGSGSSSSELEEESSSEHLTCCEQGDIAQPLLQPNNYQFC

SEQ ID NO: 88 - protein, 306 aa, Homo sapiens
MGPGVLLLLLVATAWHGQGIPVIEPSVPELVVKPGATVTLRCVGNGSVEWDGPPSPHWTLYSDGSSSILSTNNATFQNTGTYRCTEPGDPLGGSAAIHLYVKDPARPWNVLAQEVVVFEDQDALLPCLLTDPVLEAGVSLVRVRGRPLMRHTNYSFSPWHGFTIHRAKFIQSQDYQCSALMGGRKVMSISIRLKVQKVIPGPPALTLVPAELVRIRGEAAQIVCSASSVDVNFDVFLQHNNTKLAIPQQSDFHNNRYQKVLTLNLDQVDFQHAGNYSCVASNVQGKHSTSMFFRVVGTPSPSLCPA

SEQ ID NO: 89 - protein, 374 aa, Homo sapiens
MLSTSRSRFIRNTNESGEEVTTFFDYDYGAPCHKFDVKQIGAQLLPPLYSLVFIFGFVGNMLVVLILINCKKLKCLTDIYLLNLAISDLLFLITLPLWAHSAANEWVFGNAMCKLFTGLYHIGYFGGIFFIILLTIDRYLAIVHAVFALKARTVTFGVVTSVITWLVAVFASVPGIIFTKCQKEDSVYVCGPYFPRGWNNFHTIMRNILGLVLPLLIMVICYSGILKTLLRCRNEKKRHRAVRVIFTIMIVYFLFWTPYNIVILLNTFQEFFGLSNCESTSQLDQATQVTETLGMTHCCINPIIYAFVGEKFRSLFHIALGCRIAPLQKPVCGGPGVRPGKNVKVTTQGLLDGRGKGKSIGRAPEASLQDKEGA

SEQ ID NO: 90 - protein, 360 aa, Homo sapiens
MLSTSRSRFIRNTNESGEEVTTFFDYDYGAPCHKFDVKQIGAQLLPPLYSLVFIFGFVGNMLVVLILINCKKLKCLTDIYLLNLAISDLLFLITLPLWAHSAANEWVFGNAMCKLFTGLYHIGYFGGIFFIILLTIDRYLAIVHAVFALKARTVTFGVVTSVITWLVAVFASVPGIIFTKCQKEDSVYVCGPYFPRGWNNFHTIMRNILGLVLPLLIMVICYSGILKTLLRCRNEKKRHRAVRVIFTIMIVYFLFWTPYNIVILLNTFQEFFGLSNCESTSQLDQATQVTETLGMTHCCINPIIYAFVGEKFRRYLSVFFRKHITKRFCKQCPVFYRETVDGVTSTNTPSTGEQEVSAGL

SEQ ID NO: 91 - protein, 360 aa, Homo sapiens
MEDFNMESDSFEDFWKGEDLSNYSYSSTLPPFLLDAAPCEPESLEINKYFVVIIYALVFLLSLLGNSLVMLVILYSRVGRSVTDVYLLNLALADLLFALTLPIWAASKVNGWIFGTFLCKVVSLLKEVNFYSGILLLACISVDRYLAIVHATRTLTQKRYLVKFICLSIWGLSLLLALPVLLFRRTVYSSNVSPACYEDMGNNTANWRMLLRILPQSFGFIVPLLIMLFCYGFTLRTLFKAHMGQKHRAMRVIFAVVLIFLLCWLPYNLVLLADTLMRTQVIQETCERRNHIDRALDATEILGILHSCLNPLIYAFIGQKFRHGLLKILAIHGLISKDSLPKDSRPSFVGSSSGHTSTTL

SEQ ID NO: 92 - protein, 390 aa, Homo sapiens
MPPSGLRLLLLLLPLLWLLVLTPGRPAAGLSTCKTIDMELVKRKRIEAIRGQILSKLRLASPPSQGEVPPGPLPEAVLALYNSTRDRVAGESAEPEPEPEADYYAKEVTRVLMVETHNEIYDKFKQSTHSIYMFFNTSELREAVPEPVLLSRAELRLLRLKLKVEQHVELYQKYSNNSWRYLSNRLLAPSDSPEWLSFDVTGVVRQWLSRGGEIEGFRLSAHCSCDSRDNTLQVDINGFTTGRRGDLATIHGMNRPFLLLMATPLERAQHLQSSRHRRALDTNYCFSSTEKNCCVRQLYIDFRKDLGWKWIHEPKGYHANFCLGPCPYIWSLDTQYSKVLALYNQHNPGASAAPCCVPQALEPLPIVYYVGRKPKVEQLSNMIVRSCKCS

SEQ ID NO: 93 - protein, 414 aa, Homo sapiens
MHYCVLSAFLILHLVTVALSLSTCSTLDMDQFMRKRIEAIRGQILSKLKLTSPPEDYPEPEEVPPEVISIYNSTRDLLQEKASRRAAACERERSDEEYYAKEVYKIDMPPFFPSENAIPPTFYRPYFRIVRFDVSAMEKNASNLVKAEFRVFRLQNPKARVPEQRIELYQILKSKDLTSPTQRYIDSKVVKTRAEGEWLSFDVTDAVHEWLHHKDRNLGFKISLHCPCCTFVPSNNYIIPNKSEELEARFAGIDGTSTYTSGDQKTIKSTRKKNSGKTPHLLLMLLPSYRLESQQTNRRKKRALDAAYCFRNVQDNCCLRPLYIDFKRDLGWKWIHEPKGYNANFCAGACPYLWSSDTQHSRVLSLYNTINPEASASPCCVSQDLEPLTILYYIGKTPKIEQLSNMIVKSCKCS

SEQ ID NO: 94 - protein, 412 aa, Homo sapiens
MKMHLQRALVVLALLNFATVSLSLSTCTTLDFGHIKKKRVEAIRGQILSKLRLTSPPEPTVMTHVPYQVLALYNSTRELLEEMHGEREEGCTQENTESEYYAKEIHKFDMIQGLAEHNELAVCPKGITSKVFRFNVSSVEKNRTNLFRAEFRVLRVPNPSSKRNEQRIELFQILRPDEHIAKQRYIGGKNLPTRGTAEWLSFDVTDTVREWLLRRESNLGLEISIHCPCHTFQPNGDILENIHEVMEIKFKGVDNEDDHGRGDLGRLKKQKDHHNPHLILMMIPPHRLDNPGQGGQRKKRALDTNYCFRNLEENCCVRPLYIDFRQDLGWKWVHEPKGYYANFCSGPCPYLRSADTTHSTVLGLYNTLNPEASASPCCVPQDLEPLTILYYVGRTPKVEQLSNMVVKSCKCS

SEQ ID NO: 95 - protein, 503 aa, Homo sapiens
MEAAVAAPRPRLLLLVLAAAAAAAAALLPGATALQCFCHLCTKDNFTCVTDGLCFVSVTETTDKVIHNSMCIAEIDLIPRDRPFVCAPSSKTGSVTTTYCCNQDHCNKIELPTTVKSSPGLGPVELAAVIAGPVCFVCISLMLMVYICHNRTVIHHRVPNEEDPSLDRPFISEGTTLKDLIYDMTTSGSGSGLPLLVQRTIARTIVLQESIGKGRFGEVWRGKWRGEEVAVKIFSSREERSWFREAEIYQTVMLRHENILGFIAADNKDNGTWTQLWLVSDYHEHGSLFDYLNRYTVTVEGMIKLALSTASGLAHLHMEIVGTQGKPAIAHRDLKSKNILVKKNGTCCIADLGLAVRHDSATDTIDIAPNHRVGTKRYMAPEVLDDSINMKHFESFKRADIYAMGLVFWEIARRCSIGGIHEDYQLPYYDLVPSDPSVEEMRKVVCEQKLRPNIPNRWQSCEALRVMAKIMRECWYANGAARLTALRIKKTLSQLSQQEGIKM

SEQ ID NO: 96 - protein, 507 aa, Homo sapiens
MEAAVAAPRPRLLLLVLAAAAAAAAALLPGATALQCFCHLCTKDNFTCVTDGLCFVSVTETTDKVIHNSMCIAEIDLIPRDRPFVCAPSSKTGSVTTTYCCNQDHCNKIELPTTGPFSVKSSPGLGPVELAAVIAGPVCFVCISLMLMVYICHNRTVIHHRVPNEEDPSLDRPFISEGTTLKDLIYDMTTSGSGSGLPLLVQRTIARTIVLQESIGKGRFGEVWRGKWRGEEVAVKIFSSREERSWFREAEIYQTVMLRHENILGFIAADNKDNGTWTQLWLVSDYHEHGSLFDYLNRYTVTVEGMIKLALSTASGLAHLHMEIVGTQGKPAIAHRDLKSKNILVKKNGTCCIADLGLAVRHDSATDTIDIAPNHRVGTKRYMAPEVLDDSINMKHFESFKRADIYAMGLVFWEIARRCSIGGIHEDYQLPYYDLVPSDPSVEEMRKVVCEQKLRPNIPNRWQSCEALRVMAKIMRECWYANGAARLTALRIKKTLSQLSQQEGIKM

SEQ ID NO: 97 - protein, 426 aa, Homo sapiens
MEAAVAAPRPRLLLLVLAAAAAAAAALLPGATALQCFCHLCTKDNFTCVTDGLCFVSVTETTDKVIHNSMCIAEIDLIPRDRPFVCAPSSKTGSVTTTYCCNQDHCNKIELPTTGLPLLVQRTIARTIVLQESIGKGRFGEVWRGKWRGEEVAVKIFSSREERSWFREAEIYQTVMLRHENILGFIAADNKDNGTWTQLWLVSDYHEHGSLFDYLNRYTVTVEGMIKLALSTASGLAHLHMEIVGTQGKPAIAHRDLKSKNILVKKNGTCCIADLGLAVRHDSATDTIDIAPNHRVGTKRYMAPEVLDDSINMKHFESFKRADIYAMGLVFWEIARRCSIGGIHEDYQLPYYDLVPSDPSVEEMRKVVCEQKLRPNIPNRWQSCEALRVMAKIMRECWYANGAARLTALRIKKTLSQLSQQEGIKM

SEQ ID NO: 98 - protein, 567 aa, Homo sapiens
MGRGLLRGLWPLHIVLWTRIASTIPPHVQKSVNNDMIVTDNNGAVKFPQLCKFCDVRFSTCDNQKSCMSNCSITSICEKPQEVCVAVWRKNDENITLETVCHDPKLPYHDFILEDAASPKCIMKEKKKPGETFFMCSCSSDECNDNIIFSEEYNTSNPDLLLVIFQVTGISLLPPLGVAISVIIIFYCYRVNRQQKLSSTWETGKTRKLMEFSEHCAIILEDDRSDISSTCANNINHNTELLPIELDTLVGKGRFAEVYKAKLKQNTSEQFETVAVKIFPYEEYASWKTEKDIFSDINLKHENILQFLTAEERKTELGKQYWLITAFHAKGNLQEYLTRHVISWEDLRKLGSSLARGIAHLHSDHTPCGRPKMPIVHRDLKSSNILVKNDLTCCLCDFGLSLRLDPTLSVDDLANSGQVGTARYMAPEVLESRMNLENVESFKQTDVYSMALVLWEMTSRCNAVGEVKDYEPPFGSKVREHPCVESMKDNVLRDRGRPEIPSFWLNHQGIQMVCETLTECWDHDPEARLTAQCVAERFSELEHLDRLSGRSCSEEKIPEDGSLNTTK

SEQ ID NO: 99 - protein, 592 aa, Homo sapiens
MGRGLLRGLWPLHIVLWTRIASTIPPHVQKSDVEMEAQKDEIICPSCNRTAHPLRHINNDMIVTDNNGAVKFPQLCKFCDVRFSTCDNQKSCMSNCSITSICEKPQEVCVAVWRKNDENITLETVCHDPKLPYHDFILEDAASPKCIMKEKKKPGETFFMCSCSSDECNDNIIFSEEYNTSNPDLLLVIFQVTGISLLPPLGVAISVIIIFYCYRVNRQQKLSSTWETGKTRKLMEFSEHCAIILEDDRSDISSTCANNINHNTELLPIELDTLVGKGRFAEVYKAKLKQNTSEQFETVAVKIFPYEEYASWKTEKDIFSDINLKHENILQFLTAEERKTELGKQYWLITAFHAKGNLQEYLTRHVISWEDLRKLGSSLARGIAHLHSDHTPCGRPKMPIVHRDLKSSNILVKNDLTCCLCDFGLSLRLDPTLSVDDLANSGQVGTARYMAPEVLESRMNLENVESFKQTDVYSMALVLWEMTSRCNAVGEVKDYEPPFGSKVREHPCVESMKDNVLRDRGRPEIPSFWLNHQGIQMVCETLTECWDHDPEARLTAQCVAERFSELEHLDRLSGRSCSEEKIPEDGSLNTTK

SEQ ID NO: 100 - protein, 137 aa, Homo sapiens
TIPPHVQKSVNNDMIVTDNNGAVKFPQLCKFCDVRFSTCDNQKSCMSNCSITSICEKPQEVCVAVWRKNDENITLETVCHDPKLPYHDFILEDAASPKCIMKEKKKPGETFFMCSCSSDECNDNIIFSEEYNTSNPD

SEQ ID NO: 101 - protein, 136 aa, Homo sapiens
IPPHVQKSVNNDMIVTDNNGAVKFPQLCKFCDVRFSTCDNQKSCMSNCSITSICEKPQEVCVAVWRKNDENITLETVCHDPKLPYHDFILEDAASPKCIMKEKKKPGETFFMCSCSSDECNDNIIFSEEYNTSNPD

SEQ ID NO: 102 - protein, 162 aa, Homo sapiens
TIPPHVQKSDVEMEAQKDEIICPSCNRTAHPLRHINNDMIVTDNNGAVKFPQLCKFCDVRFSTCDNQKSCMSNCSITSICEKPQEVCVAVWRKNDENITLETVCHDPKLPYHDFILEDAASPKCIMKEKKKPGETFFMCSCSSDECNDNIIFSEEYNTSNPD

SEQ ID NO: 103 - protein, 101 aa, Homo sapiens
QLCKFCDVRFSTCDNQKSCMSNCSITSICEKPQEVCVAVWRKNDENITLETVCHDPKLPYHDFILEDAASPKCIMKEKKKPGETFFMCSCSSDECNDNIIF

SEQ ID NO: 104 - protein, 93 aa, Homo sapiens
LQCFCHLCTKDNFTCVTDGLCFVSVTETTDKVIHNSMCIAEIDLIPRDRPFVCAPSSKTGSVTTTYCCNQDHCNKIELPTTVKSSPGLGPVEL

SEQ ID NO: 105 - protein, 79 aa, Homo sapiens
ALQCFCHLCTKDNFTCVTDGLCFVSVTETTDKVIHNSMCIAEIDLIPRDRPFVCAPSSKTGSVTTTYCCNQDHCNKIEL

SEQ ID NO: 106 - protein, 851 aa, Homo sapiens
MTSHYVIAIFALMSSCLATAGPEPGALCELSPVSASHPVQALMESFTVLSGCASRGTTGLPQEVHVLNLRTAGQGPGQLQREVTLHLNPISSVHIHHKSVVFLLNSPHPLVWHLKTERLATGVSRLFLVSEGSVVQFSSANFSLTAETEERNFPHGNEHLLNWARKEYGAVTSFTELKIARNIYIKVGEDQVFPPKCNIGKNFLSLNYLAEYLQPKAAEGCVMSSQPQNEEVHIIELITPNSNPYSAFQVDITIDIRPSQEDLEVVKNLILILKCKKSVNWVIKSFDVKGSLKIIAPNSIGFGKESERSMTMTKSIRDDIPSTQGNLVKWALDNGYSPITSYTMAPVANRFHLRLENNAEEMGDEEVHTIPPELRILLDPGALPALQNPPIRGGEGQNGGLPFPFPDISRRVWNEEGEDGLPRPKDPVIPSIQLFPGLREPEEVQGSVDIALSVKCDNEKMIVAVEKDSFQASGYSGMDVTLLDPTCKAKMNGTHFVLESPLNGCGTRPRWSALDGVVYYNSIVIQVPALGDSSGWPDGYEDLESGDNGFPGDMDEGDASLFTRPEIVVFNCSLQQVRNPSSFQEQPHGNITFNMELYNTDLFLVPSQGVFSVPENGHVYVEVSVTKAEQELGFAIQTCFISPYSNPDRMSHYTIIENICPKDESVKFYSPKRVHFPIPQADMDKKRFSFVFKPVFNTSLLFLQCELTLCTKMEKHPQKLPKCVPPDEACTSLDASIIWAMMQNKKTFTKPLAVIHHEAESKEKGPSMKEPNPISPPIFHGLDTLTVMGIAFAAFVIGALLTGALWYIYSHTGETAGRQQVPTSPPASENSSAAHSIGSTQSTPCSSSSTA

SEQ ID NO: 107 - protein, 850 aa, Homo sapiens
MTSHYVIAIFALMSSCLATAGPEPGALCELSPVSASHPVQALMESFTVLSGCASRGTTGLPQEVHVLNLRTAGQGPGQLQREVTLHLNPISSVHIHHKSVVFLLNSPHPLVWHLKTERLATGVSRLFLVSEGSVVQFSSANFSLTAETEERNFPHGNEHLLNWARKEYGAVTSFTELKIARNIYIKVGEDQVFPPKCNIGKNFLSLNYLAEYLQPKAAEGCVMSSQPQNEEVHIIELITPNSNPYSAFQVDITIDIRPSQEDLEVVKNLILILKCKKSVNWVIKSFDVKGSLKIIAPNSIGFGKESERSMTMTKSIRDDIPSTQGNLVKWALDNGYSPITSYTMAPVANRFHLRLENNEEMGDEEVHTIPPELRILLDPGALPALQNPPIRGGEGQNGGLPFPFPDISRRVWNEEGEDGLPRPKDPVIPSIQLFPGLREPEEVQGSVDIALSVKCDNEKMIVAVEKDSFQASGYSGMDVTLLDPTCKAKMNGTHFVLESPLNGCGTRPRWSALDGVVYYNSIVIQVPALGDSSGWPDGYEDLESGDNGFPGDMDEGDASLFTRPEIVVFNCSLQQVRNPSSFQEQPHGNITFNMELYNTDLFLVPSQGVFSVPENGHVYVEVSVTKAEQELGFAIQTCFISPYSNPDRMSHYTIIENICPKDESVKFYSPKRVHFPIPQADMDKKRFSFVFKPVFNTSLLFLQCELTLCTKMEKHPQKLPKCVPPDEACTSLDASIIWAMMQNKKTFTKPLAVIHHEAESKEKGPSMKEPNPISPPIFHGLDTLTVMGIAFAAFVIGALLTGALWYIYSHTGETAGRQQVPTSPPASENSSAAHSIGSTQSTPCSSSSTA

SEQ ID NO: 108 - protein, 767 aa, Homo sapiens
GPEPGALCELSPVSASHPVQALMESFTVLSGCASRGTTGLPQEVHVLNLRTAGQGPGQLQREVTLHLNPISSVHIHHKSVVFLLNSPHPLVWHLKTERLATGVSRLFLVSEGSVVQFSSANFSLTAETEERNFPHGNEHLLNWARKEYGAVTSFTELKIARNIYIKVGEDQVFPPKCNIGKNFLSLNYLAEYLQPKAAEGCVMSSQPQNEEVHIIELITPNSNPYSAFQVDITIDIRPSQEDLEVVKNLILILKCKKSVNWVIKSFDVKGSLKIIAPNSIGFGKESERSMTMTKSIRDDIPSTQGNLVKWALDNGYSPITSYTMAPVANRFHLRLENNAEEMGDEEVHTIPPELRILLDPGALPALQNPPIRGGEGQNGGLPFPFPDISRRVWNEEGEDGLPRPKDPVIPSIQLFPGLREPEEVQGSVDIALSVKCDNEKMIVAVEKDSFQASGYSGMDVTLLDPTCKAKMNGTHFVLESPLNGCGTRPRWSALDGVVYYNSIVIQVPALGDSSGWPDGYEDLESGDNGFPGDMDEGDASLFTRPEIVVFNCSLQQVRNPSSFQEQPHGNITFNMELYNTDLFLVPSQGVFSVPENGHVYVEVSVTKAEQELGFAIQTCFISPYSNPDRMSHYTIIENICPKDESVKFYSPKRVHFPIPQADMDKKRFSFVFKPVFNTSLLFLQCELTLCTKMEKHPQKLPKCVPPDEACTSLDASIIWAMMQNKKTFTKPLAVIHHEAESKEKGPSMKEPNPISPPIFHGLDTLTV

SEQ ID NO: 109 - protein, 121 aa, Artificial Sequence
  source: /note="Description of Artificial Sequence: Synthetic polypeptide"
EVQLVESGGGLVQPGGSLRLSCAASGFTFSRYWMSWVRQAPGKGLEWVANIKQDGSEKYYVDSVKGRFTISRDNAKNSLYLQMNSLRAEDTAVYYCAREGGWFGELAFDYWGQGTLVTVSS

SEQ ID NO: 110 - protein, 108 aa, Artificial Sequence
  source: /note="Description of Artificial Sequence: Synthetic polypeptide"
EIVLTQSPGTLSLSPGERATLSCRASQRVSSSYLAWYQQKPGQAPRLLIYDASSRATGIPDRFSGSGSGTDFTLTISRLEPEDFAVYYCQQYGSLPWTFGQGTKVEIK

SEQ ID NO: 111 - protein, 118 aa, Artificial Sequence [sequence omitted]

SEQ ID NO: 112 - protein, 107 aa, Artificial Sequence [sequence omitted]

SEQ ID NO: 113 - protein, 120 aa, Artificial Sequence
  source: /note="Description of Artificial Sequence: Synthetic polypeptide"
EVQLLESGGGLVQPGGSLRLSCAASGFTFSSYIMMWVRQAPGKGLEWVSSIYPSGGITFYADTVKGRFTISRDNSKNTLYLQMNSLRAEDTAVYYCARIKLGTVTTVDYWGQGTLVTVSS

SEQ ID NO: 114 - protein, 110 aa, Artificial Sequence
  source: /note="Description of Artificial Sequence: Synthetic polypeptide"
QSALTQPASVSGSPGQSITISCTGTSSDVGGYNYVSWYQQHPGKAPKLMIYDVSNRPSGVSNRFSGSKSGNTASLTISGLQAEDEADYYCSSYTSSSTRVFGTGTKVTVL

SEQ ID NO: 115 - DNA, 60 bp, Unknown
  source: /note="Description of Unknown: Ig Kappa leader sequence"
atggaaaccgacacactgctgctgtgggtgctgctcttgtgggtgccaggatctacagga

SEQ ID NO: 116 - protein, 20 aa, Unknown
  source: /note="Description of Unknown: Ig Kappa leader sequence"
METDTLLLWVLLLWVPGSTG

SEQ ID NO: 117 - protein, 361 aa, Homo sapiens
LSTCKTIDMELVKRKRIEAIRGQILSKLRLASPPSQGEVPPGPLPEAVLALYNSTRDRVAGESAEPEPEPEADYYAKEVTRVLMVETHNEIYDKFKQSTHSIYMFFNTSELREAVPEPVLLSRAELRLLRLKLKVEQHVELYQKYSNNSWRYLSNRLLAPSDSPEWLSFDVTGVVRQWLSRGGEIEGFRLSAHCSCDSRDNTLQVDINGFTTGRRGDLATIHGMNRPFLLLMATPLERAQHLQSSRHRRALDTNYCFSSTEKNCCVRQLYIDFRKDLGWKWIHEPKGYHANFCLGPCPYIWSLDTQYSKVLALYNQHNPGASAAPCCVPQALEPLPIVYYVGRKPKVEQLSNMIVRSCKCS

SEQ ID NO: 118 - protein, 394 aa, Homo sapiens
LSTCSTLDMDQFMRKRIEAIRGQILSKLKLTSPPEDYPEPEEVPPEVISIYNSTRDLLQEKASRRAAACERERSDEEYYAKEVYKIDMPPFFPSENAIPPTFYRPYFRIVRFDVSAMEKNASNLVKAEFRVFRLQNPKARVPEQRIELYQILKSKDLTSPTQRYIDSKVVKTRAEGEWLSFDVTDAVHEWLHHKDRNLGFKISLHCPCCTFVPSNNYIIPNKSEELEARFAGIDGTSTYTSGDQKTIKSTRKKNSGKTPHLLLMLLPSYRLESQQTNRRKKRALDAAYCFRNVQDNCCLRPLYIDFKRDLGWKWIHEPKGYNANFCAGACPYLWSSDTQHSRVLSLYNTINPEASASPCCVSQDLEPLTILYYIGKTPKIEQLSNMIVKSCKCS

SEQ ID NO: 119 - protein, 389 aa, Homo sapiens
LSTCTTLDFGHIKKKRVEAIRGQILSKLRLTSPPEPTVMTHVPYQVLALYNSTRELLEEMHGEREEGCTQENTESEYYAKEIHKFDMIQGLAEHNELAVCPKGITSKVFRFNVSSVEKNRTNLFRAEFRVLRVPNPSSKRNEQRIELFQILRPDEHIAKQRYIGGKNLPTRGTAEWLSFDVTDTVREWLLRRESNLGLEISIHCPCHTFQPNGDILENIHEVMEIKFKGVDNEDDHGRGDLGRLKKQKDHHNPHLILMMIPPHRLDNPGQGGQRKKRALDTNYCFRNLEENCCVRPLYIDFRQDLGWKWVHEPKGYYANFCSGPCPYLRSADTTHSTVLGLYNTLNPEASASPCCVPQDLEPLTILYYVGRTPKVEQLSNMVVKSCKCS

SEQ ID NO: 120 - protein, 470 aa, Homo sapiens
LQCFCHLCTKDNFTCVTDGLCFVSVTETTDKVIHNSMCIAEIDLIPRDRPFVCAPSSKTGSVTTTYCCNQDHCNKIELPTTVKSSPGLGPVELAAVIAGPVCFVCISLMLMVYICHNRTVIHHRVPNEEDPSLDRPFISEGTTLKDLIYDMTTSGSGSGLPLLVQRTIARTIVLQESIGKGRFGEVWRGKWRGEEVAVKIFSSREERSWFREAEIYQTVMLRHENILGFIAADNKDNGTWTQLWLVSDYHEHGSLFDYLNRYTVTVEGMIKLALSTASGLAHLHMEIVGTQGKPAIAHRDLKSKNILVKKNGTCCIADLGLAVRHDSATDTIDIAPNHRVGTKRYMAPEVLDDSINMKHFESFKRADIYAMGLVFWEIARRCSIGGIHEDYQLPYYDLVPSDPSVEEMRKVVCEQKLRPNIPNRWQSCEALRVMAKIMRECWYANGAARLTALRIKKTLSQLSQQEGIKM

SEQ ID NO: 121 - protein, 474 aa, Homo sapiens
LQCFCHLCTKDNFTCVTDGLCFVSVTETTDKVIHNSMCIAEIDLIPRDRPFVCAPSSKTGSVTTTYCCNQDHCNKIELPTTGPFSVKSSPGLGPVELAAVIAGPVCFVCISLMLMVYICHNRTVIHHRVPNEEDPSLDRPFISEGTTLKDLIYDMTTSGSGSGLPLLVQRTIARTIVLQESIGKGRFGEVWRGKWRGEEVAVKIFSSREERSWFREAEIYQTVMLRHENILGFIAADNKDNGTWTQLWLVSDYHEHGSLFDYLNRYTVTVEGMIKLALSTASGLAHLHMEIVGTQGKPAIAHRDLKSKNILVKKNGTCCIADLGLAVRHDSATDTIDIAPNHRVGTKRYMAPEVLDDSINMKHFESFKRADIYAMGLVFWEIARRCSIGGIHEDYQLPYYDLVPSDPSVEEMRKVVCEQKLRPNIPNRWQSCEALRVMAKIMRECWYANGAARLTALRIKKTLSQLSQQEGIKM

SEQ ID NO: 122 - protein, 393 aa, Homo sapiens
LQCFCHLCTKDNFTCVTDGLCFVSVTETTDKVIHNSMCIAEIDLIPRDRPFVCAPSSKTGSVTTTYCCNQDHCNKIELPTTGLPLLVQRTIARTIVLQESIGKGRFGEVWRGKWRGEEVAVKIFSSREERSWFREAEIYQTVMLRHENILGFIAADNKDNGTWTQLWLVSDYHEHGSLFDYLNRYTVTVEGMIKLALSTASGLAHLHMEIVGTQGKPAIAHRDLKSKNILVKKNGTCCIADLGLAVRHDSATDTIDIAPNHRVGTKRYMAPEVLDDSINMKHFESFKRADIYAMGLVFWEIARRCSIGGIHEDYQLPYYDLVPSDPSVEEMRKVVCEQKLRPNIPNRWQSCEALRVMAKIMRECWYANGAARLTALRIKKTLSQLSQQEGIKM

SEQ ID NO: 123 - protein, 545 aa, Homo sapiens
TIPPHVQKSVNNDMIVTDNNGAVKFPQLCKFCDVRFSTCDNQKSCMSNCSITSICEKPQEVCVAVWRKNDENITLETVCHDPKLPYHDFILEDAASPKCIMKEKKKPGETFFMCSCSSDECNDNIIFSEEYNTSNPDLLLVIFQVTGISLLPPLGVAISVIIIFYCYRVNRQQKLSSTWETGKTRKLMEFSEHCAIILEDDRSDISSTCANNINHNTELLPIELDTLVGKGRFAEVYKAKLKQNTSEQFETVAVKIFPYEEYASWKTEKDIFSDINLKHENILQFLTAEERKTELGKQYWLITAFHAKGNLQEYLTRHVISWEDLRKLGSSLARGIAHLHSDHTPCGRPKMPIVHRDLKSSNILVKNDLTCCLCDFGLSLRLDPTLSVDDLANSGQVGTARYMAPEVLESRMNLENVESFKQTDVYSMALVLWEMTSRCNAVGEVKDYEPPFGSKVREHPCVESMKDNVLRDRGRPEIPSFWLNHQGIQMVCETLTECWDHDPEARLTAQCVAERFSELEHLDRLSGRSCSEEKIPEDGSLNTTK

SEQ ID NO: 124 - protein, 570 aa, Homo sapiens
TIPPHVQKSDVEMEAQKDEIICPSCNRTAHPLRHINNDMIVTDNNGAVKFPQLCKFCDVRFSTCDNQKSCMSNCSITSICEKPQEVCVAVWRKNDENITLETVCHDPKLPYHDFILEDAASPKCIMKEKKKPGETFFMCSCSSDECNDNIIFSEEYNTSNPDLLLVIFQVTGISLLPPLGVAISVIIIFYCYRVNRQQKLSSTWETGKTRKLMEFSEHCAIILEDDRSDISSTCANNINHNTELLPIELDTLVGKGRFAEVYKAKLKQNTSEQFETVAVKIFPYEEYASWKTEKDIFSDINLKHENILQFLTAEERKTELGKQYWLITAFHAKGNLQEYLTRHVISWEDLRKLGSSLARGIAHLHSDHTPCGRPKMPIVHRDLKSSNILVKNDLTCCLCDFGLSLRLDPTLSVDDLANSGQVGTARYMAPEVLESRMNLENVESFKQTDVYSMALVLWEMTSRCNAVGEVKDYEPPFGSKVREHPCVESMKDNVLRDRGRPEIPSFWLNHQGIQMVCETLTECWDHDPEARLTAQCVAERFSELEHLDRLSGRSCSEEKIPEDGSLNTTK

SEQ ID NO: 125 - protein, 831 aa, Homo sapiens
GPEPGALCELSPVSASHPVQALMESFTVLSGCASRGTTGLPQEVHVLNLRTAGQGPGQLQREVTLHLNPISSVHIHHKSVVFLLNSPHPLVWHLKTERLATGVSRLFLVSEGSVVQFSSANFSLTAETEERNFPHGNEHLLNWARKEYGAVTSFTELKIARNIYIKVGEDQVFPPKCNIGKNFLSLNYLAEYLQPKAAEGCVMSSQPQNEEVHIIELITPNSNPYSAFQVDITIDIRPSQEDLEVVKNLILILKCKKSVNWVIKSFDVKGSLKIIAPNSIGFGKESERSMTMTKSIRDDIPSTQGNLVKWALDNGYSPITSYTMAPVANRFHLRLENNAEEMGDEEVHTIPPELRILLDPGALPALQNPPIRGGEGQNGGLPFPFPDISRRVWNEEGEDGLPRPKDPVIPSIQLFPGLREPEEVQGSVDIALSVKCDNEKMIVAVEKDSFQASGYSGMDVTLLDPTCKAKMNGTHFVLESPLNGCGTRPRWSALDGVVYYNSIVIQVPALGDSSGWPDGYEDLESGDNGFPGDMDEGDASLFTRPEIVVFNCSLQQVRNPSSFQEQPHGNITFNMELYNTDLFLVPSQGVFSVPENGHVYVEVSVTKAEQELGFAIQTCFISPYSNPDRMSHYTIIENICPKDESVKFYSPKRVHFPIPQADMDKKRFSFVFKPVFNTSLLFLQCELTLCTKMEKHPQKLPKCVPPDEACTSLDASIIWAMMQNKKTFTKPLAVIHHEAESKEKGPSMKEPNPISPPIFHGLDTLTVMGIAFAAFVIGALLTGALWYIYSHTGETAGRQQVPTSPPASENSSAAHSIGSTQSTPCSSSSTA

SEQ ID NO: 126 - protein, 830 aa, Homo sapiens
GPEPGALCELSPVSASHPVQALMESFTVLSGCASRGTTGLPQEVHVLNLRTAGQGPGQLQREVTLHLNPISSVHIHHKSVVFLLNSPHPLVWHLKTERLATGVSRLFLVSEGSVVQFSSANFSLTAETEERNFPHGNEHLLNWARKEYGAVTSFTELKIARNIYIKVGEDQVFPPKCNIGKNFLSLNYLAEYLQPKAAEGCVMSSQPQNEEVHIIELITPNSNPYSAFQVDITIDIRPSQEDLEVVKNLILILKCKKSVNWVIKSFDVKGSLKIIAPNSIGFGKESERSMTMTKSIRDDIPSTQGNLVKWALDNGYSPITSYTMAPVANRFHLRLENNEEMGDEEVHTIPPELRILLDPGALPALQNPPIRGGEGQNGGLPFPFPDISRRVWNEEGEDGLPRPKDPVIPSIQLFPGLREPEEVQGSVDIALSVKCDNEKMIVAVEKDSFQASGYSGMDVTLLDPTCKAKMNGTHFVLESPLNGCGTRPRWSALDGVVYYNSIVIQVPALGDSSGWPDGYEDLESGDNGFPGDMDEGDASLFTRPEIVVFNCSLQQVRNPSSFQEQPHGNITFNMELYNTDLFLVPSQGVFSVPENGHVYVEVSVTKAEQELGFAIQTCFISPYSNPDRMSHYTIIENICPKDESVKFYSPKRVHFPIPQADMDKKRFSFVFKPVFNTSLLFLQCELTLCTKMEKHPQKLPKCVPPDEACTSLDASIIWAMMQNKKTFTKPLAVIHHEAESKEKGPSMKEPNPISPPIFHGLDTLTVMGIAFAAFVIGALLTGALWYIYSHTGETAGRQQVPTSPPASENSSAAHSIGSTQSTPCSSSSTA

SEQ ID NO: 127 - protein, 633 aa, Artificial Sequence
  source: /note="Description of Artificial Sequence: Synthetic polypeptide"
EVQLVESGGGLVQPGGSLRLSCAASGFTFSNDEMNWIRQAPGKGLEWVSYISSGSSTIYYADAVKGRFTISRDNARNSLYLQMNSLRAEDTAVYYCARGVDGDFSFDYWGQGTLVTVSSGGGGSGGGGSGGGGSGGGGSQLVLTQPPSVSGAPGQRVTISCTGSSSNIGAGYDVHWYQQLPGTAPKLLIYGNSNRPSGVPDRFSGSKSGTSASLAITGLQAEDEADYYCQSYDSSLSEEVFGGGTKLTVLDKTHTCPPCPAPELLGGPSVFLFPPKPKDTLMISRTPEVTCVVVDVSHEDPEVKFNWYVDGVEVHNAKTKPREEQYNSTYRVVSVLTVLHQDWLNGKEYKCKVSNKALPAPIEKTISKAKGQPREPQVYTLPPCREEMTKNQVSLWCLVKGFYPSDIAVEWESNGQPENNYKTTPPVLDSDGSFFLYSKLTVDKSRWQQGNVFSCSVMHEALHNHYTQKSLSLSPGKGGGGSGGGGSGGGGSGGGGSIPPHVQKSVNNDMIVTDNNGAVKFPQLCKFCDVRFSTCDNQKSCMSNCSITSICEKPQEVCVAVWRKNDENITLETVCHDPKLPYHDFILEDAASPKCIMKEKKKPGETFFMCSCSSDECNDNIIFSEEYNTSNPD

SEQ ID NO: 128 - DNA, 1899 bp, Artificial Sequence
  source: /note="Description of Artificial Sequence: Synthetic polynucleotide"
gaagtgcagctggttgaatctggcggaggactggttcagcctggcggatctctgagactgtcttgtgccgcctctggcttcaccttctccaacgacgagatgaactggatcagacaggcccctggcaaaggcctggaatgggtgtcctacatctcctccggctcctccaccatctactacgccgatgctgtgaagggcagattcaccatctctcgggacaacgcccggaactccctgtacctgcagatgaactctctgagagccgaggacaccgccgtgtactactgtgctagaggcgtggacggcgacttctccttcgattattggggccagggcaccctggtcacagtttctagcggaggcggaggttctggcggcggtggaagtggcggtggtggatcaggcggcggaggatctcagctggttttgacccagcctccttccgtgtctggtgctcctggacagagagtgaccatctcttgcaccggctccagctccaatatcggcgctggctacgacgtgcactggtatcagcagctgcctggcacagctcccaaactgctgatctacggcaactccaaccggccttctggcgtgcccgatagattctccggctctaagtctggcacctctgccagcctggctatcactggactgcaggctgaggacgaggccgactactactgccagtcctacgactccagcctgtccgaggaagtttttggcggaggcaccaagctgaccgtgctggacaagacccatacctgtcctccatgtcctgctccagagctgctcggaggcccttctgtgttcctgtttcctccaaagcctaaggacaccctgatgatctctcggacccctgaagtgacctgcgtggtggtcgatgtgtctcacgaggatcccgaagtgaagttcaattggtacgtcgacggcgtcgaggtgcacaacgctaagaccaagcctagagaggaacagtacaactccacctacagagtggtgtccgtgctgacagtgctgcaccaggattggctgaacggcaaagagtacaagtgcaaggtgtccaacaaggccctgcctgctcctatcgaaaagaccatctccaaggccaagggccagcctagggaaccccaggtttacaccctgcctccatgccgggaagagatgaccaagaaccaggtgtccctgtggtgcctggtcaagggcttctacccttccgatatcgccgtggaatgggagagcaatggccagcctgagaacaactacaagaccacacctcctgtgctggactccgacggctcattcttcctgtacagcaagctgactgtggataagtcccggtggcagcagggcaacgtgttctcctgttctgtgatgcacgaggccctgcacaaccactacacccagaagtccctgtctctgtctcccggaaaaggtggtggtggtagtggtggcggtggctctggtggtggcggatccggcggaggcggttctattcctccacacgtgcagaaatccgtgaacaacgacatgatcgtgaccgacaacaatggcgccgtgaagttccctcagctgtgcaagttttgcgacgtgcggttctctacctgcgacaaccagaaatcctgcatgtccaactgctccatcacctccatctgcgagaagccccaagaagtgtgcgtcgccgtctggcggaagaacgatgagaacatcaccctggaaaccgtgtgccacgatcctaagctgccctaccacgacttcatcctggaagatgccgcttctcccaagtgcatcatgaaggaaaagaagaagcccggcgagactttcttcatgtgcagctgctcctccgacgagtgcaacgacaacatcatcttctccgaagagtataacaccagcaatcccgac

SEQ ID NO: 129 - DNA, 357 bp, Artificial Sequence
  source: /note="Description of Artificial Sequence: Synthetic polynucleotide"
gaagtgcagctggttgaatctggcggaggactggttcagcctggcggatctctgagactgtcttgtgccgcctctggcttcaccttctccaacgacgagatgaactggatcagacaggcccctggcaaaggcctggaatgggtgtcctacatctcctccggctcctccaccatctactacgccgatgctgtgaagggcagattcaccatctctcgggacaacgcccggaactccctgtacctgcagatgaactctctgagagccgaggacaccgccgtgtactactgtgctagaggcgtggacggcgacttctccttcgattattggggccagggcaccctggtcacagtttctagc

SEQ ID NO: 130 - DNA, 333 bp, Artificial Sequence
  source: /note="Description of Artificial Sequence: Synthetic polynucleotide"
cagctggttttgacccagcctccttccgtgtctggtgctcctggacagagagtgaccatctcttgcaccggctccagctccaatatcggcgctggctacgacgtgcactggtatcagcagctgcctggcacagctcccaaactgctgatctacggcaactccaaccggccttctggcgtgcccgatagattctccggctctaagtctggcacctctgccagcctggctatcactggactgcaggctgaggacgaggccgactactactgccagtcctacgactccagcctgtccgaggaagtttttggcggaggcaccaagctgaccgtgctg

SEQ ID NO: 131 - protein, 603 aa, Artificial Sequence
  source: /note="Description of Artificial Sequence: Synthetic polypeptide"
EVQLVESGGGLVKPGGSLRLSCAASGFSFNAYAMNWVRQAPGKGLEWVGRIRTKNNNYATYYADSVKDRFTISRDDSKSTLYLQMNSLKTEDTAVYYCTTFYGNGVWGQGTTVTVSSASTKGPSVFPLAPSSKSTSGGTAALGCLVKDYFPEPVTVSWNSGALTSGVHTFPAVLQSSGLYSLSSVVTVPSSSLGTQTYICNVNHKPSNTKVDKRVEPKSCDKTHTCPPCPAPELLGGPSVFLFPPKPKDTLMISRTPEVTCVVVDVSHEDPEVKFNWYVDGVEVHNAKTKPREEQYNSTYRVVSVLTVLHQDWLNGKEYKCKVSNKALPAPIEKTISKAKGQPREPQVCTLPPSREEMTKNQVSLSCAVKGFYPSDIAVEWESNGQPENNYKTTPPVLDSDGSFFLVSKLTVDKSRWQQGNVFSCSVMHEALHNHYTQKSLSLSPGKGGGGSGGGGSGGGGSGGGGSIPPHVQKSVNNDMIVTDNNGAVKFPQLCKFCDVRFSTCDNQKSCMSNCSITSICEKPQEVCVAVWRKNDENITLETVCHDPKLPYHDFILEDAASPKCIMKEKKKPGETFFMCSCSSDECNDNIIFSEEYNTSNPD

SEQ ID NO: 132 - DNA, 1809 bp, Artificial Sequence
  source: /note="Description of Artificial Sequence: Synthetic polynucleotide"
gaagtgcagctggttgaatctggcggcggactggttaagcctggcggatctctgagactgtcttgtgccgcctccggcttctccttcaatgcctacgccatgaactgggtccgacaggctcctggcaaaggcctggaatgggtcggaagaatccggaccaagaacaacaactacgccacctactacgccgactccgtgaaggaccggttcaccatctctcgggacgactccaagagcaccctgtacctgcagatgaactccctgaaaaccgaggacaccgccgtgtactactgcaccaccttctacggcaatggcgtgtggggccagggcacaacagtgacagtctcttccgcctccaccaagggaccctctgtgtttcctctggctccctccagcaagtctacctctggtggaacagctgccctgggctgcctggtcaaggattactttcctgagcctgtgaccgtgtcctggaactctggcgctctgacatctggcgtgcacacctttccagctgtgctgcagtcctccggcctgtactctctgtcctctgtcgtgaccgtgccttccagctctctgggcacccagacctacatctgcaatgtgaaccacaagccttccaacaccaaggtggacaagagagtggaacccaagtcctgcgacaagacccacacctgtcctccatgtcctgctccagaactgctcggcggaccttccgtgttcctgtttcctccaaagcctaaggacaccctgatgatctctcggacccctgaagtgacctgcgtggtggtggatgtgtctcacgaggatcccgaagtgaagttcaattggtacgtggacggcgtggaagtgcacaacgccaagaccaagcctagagaggaacagtacaactccacctacagagtggtgtccgtgctgaccgtgctgcaccaggattggctgaacggcaaagagtacaagtgcaaggtgtccaacaaggccctgcctgctcctatcgaaaagaccatctccaaggccaagggccagcctcgggaacctcaagtctgtaccctgcctcctagccgggaagagatgaccaagaatcaggtgtccctgtcctgcgccgtgaagggcttctacccttctgatatcgccgtggaatgggagagcaacggccagcctgagaacaactacaagacaacccctcctgtgctggactccgacggctcattcttcctggtgtccaagctgacagtggacaagtccagatggcagcagggcaacgtgttctcctgctccgtgatgcacgaggccctgcacaatcactacacccagaagtccctgtctctgagcccaggcaaaggtggcggaggatctggcggaggtggtagcggcggaggcggatcaggcggtggtggctctattcctccacacgtgcagaaatccgtgaacaacgacatgatcgtgaccgacaacaacggcgctgtgaagttccctcagctgtgcaagttctgcgacgtgcggttctccacctgtgacaaccagaaatcctgcatgtccaactgctccatcacctccatctgcgagaagccccaagaagtgtgcgtcgccgtctggcggaagaacgacgagaacatcaccctggaaaccgtgtgccacgatcctaagctgccctaccacgacttcatcctggaagatgccgcctctcctaagtgcatcatgaaggaaaagaagaagcccggcgagactttcttcatgtgcagctgctcctccgacgagtgcaacgacaacatcatcttctccgaagagtataacaccagcaatcccgac

SEQ ID NO: 133 - DNA, 351 bp, Artificial Sequence
  source: /note="Description of Artificial Sequence: Synthetic polynucleotide"
gaagtgcagctggttgaatctggcggcggactggttaagcctggcggatctctgagactgtcttgtgccgcctccggcttctccttcaatgcctacgccatgaactgggtccgacaggctcctggcaaaggcctggaatgggtcggaagaatccggaccaagaacaacaactacgccacctactacgccgactccgtgaaggaccggttcaccatctctcgggacgactccaagagcaccctgtacctgcagatgaactccctgaaaaccgaggacaccgccgtgtactactgcaccaccttctacggcaatggcgtgtggggccagggcacaacagtgacagtctcttcc

SEQ ID NO: 134 - DNA, 657 bp, Artificial Sequence
  source: /note="Description of Artificial Sequence: Synthetic polynucleotide"
gacgtcgtcatgacccaatccccgctctccctgccggtgactctcggccagccggcgtccatctcgtgcaagtcctcccaatccctgctggattcggatgggaagactttcctgaactggctgcagcaacggcccggccagtcgccacggcggctgatctacctggtgtccaagctggattcaggtgtgcctgatagattctccggcagcggatcggggaccgacttcacgctgaagatctccagagtggaagcagaggacgtgggcgtctattactgttggcaggggactcatttcccctatacctttggaggtggtactaaggtggaaattaagagaacagtggccgctccttccgtgttcatcttcccaccctccgacgagcagctgaagtccggcaccgcttctgtcgtgtgcctgctcaacaacttctaccctcgggaagccaaggtgcagtggaaggtggacaacgccctgcagtccggcaactcccaggaatccgtcaccgagcaggactccaaggacagcacctactccctgtcctccaccctgaccctgtccaaggccgactacgagaagcacaaggtgtacgcctgcgaagtgacccaccagggcctgagcagccccgtgaccaagtccttcaaccggggcgagtgc

SEQ ID NO: 135 - protein, 99 aa, Unknown
  source: /note="Description of Unknown: TGFbetaR1 fragment 3 sequence"
LLPGATALQCFCHLCTKDNFTCVTDGLCFVSVTETTDKVIHNSMCIAEIDLIPRDRPFVCAPSSKTGSVTTTYCCNQDHCNKIELPTTVKSSPGLGPVE

SEQ ID NO: 136 - protein, 631 aa, Artificial Sequence
  source: /note="Description of Artificial Sequence: Synthetic polypeptide"
QVQLVQSGGGVVQPGRSLRLSCAASGFTFSSYAMHWVRQAPGKGLEWVAVIPYYGSNKYYADSVKGRFTISRDNSKNTLYLQMNSLRAEDTAVYYCARELDYGDYGLDVWGKGTTVTVSSGGGGSGGGGSGGGGSGGGGSSYVLTQPPSVSVAPGKTARITCGGNNIGSKSVHWYQQKPGQAPVLVVYDDSDRPSGIPERFSGSNSGNTATLTISRVEAGDEADYYCQVWDSSSDHVVFGGGTQLTVLDKTHTCPPCPAPELLGGPSVFLFPPKPKDTLMISRTPEVTCVVVDVSHEDPEVKFNWYVDGVEVHNAKTKPREEQYNSTYRVVSVLTVLHQDWLNGKEYKCKVSNKALPAPIEKTISKAKGQPREPQVYTLPPCREEMTKNQVSLWCLVKGFYPSDIAVEWESNGQPENNYKTTPPVLDSDGSFFLYSKLTVDKSRWQQGNVFSCSVMHEALHNHYTQKSLSLSPGKGGGGSGGGGSGGGGSGGGGSIPPHVQKSVNNDMIVTDNNGAVKFPQLCKFCDVRFSTCDNQKSCMSNCSITSICEKPQEVCVAVWRKNDENITLETVCHDPKLPYHDFILEDAASPKCIMKEKKKPGETFFMCSCSSDECNDNIIFSEEYNTSNPD

SEQ ID NO: 137 - DNA, 1893 bp, Artificial Sequence
  source: /note="Description of Artificial Sequence: Synthetic polynucleotide"
caggtgcagctggttcaatctggcggcggagttgtgcagcctggcagatctctgagactgtcttgtgccgcctccggcttcaccttctcctcttacgctatgcactgggtccgacaggcccctggcaaaggattggaatgggtcgccgtgattccctactacggctccaacaagtactacgccgactccgtgaagggcagattcaccatctctcgggacaactccaagaacaccctgtacctgcagatgaactccctgagagccgaggacaccgccgtgtactactgtgccagagagctggactacggcgattacggcctggatgtgtggggcaagggcaccacagtgacagtttctagcggaggcggaggatcaggtggtggtggatcaggcggcggtggtagtggtggcggtggttcttcttacgtgctgacccagcctccttccgtgtctgtggctcctggcaagaccgccagaatcacctgtggcggcaacaacatcggctccaagtccgtgcactggtatcagcagaagccaggccaggctcctgtgctggtggtgtacgacgactccgatagaccctctggcatccctgagcggttctccggctctaactctggcaacaccgctacactgaccatctccagagtggaagctggcgacgaggccgactactactgccaagtgtgggactcctcctccgatcacgtggtgtttggcggaggcacacagctgaccgtgctggacaagacccatacctgtcctccatgtcctgctccagagctgctcggaggcccttctgtgttcctgtttcctccaaagcctaaggacaccctgatgatctctcggacccctgaagtgacctgcgtggtggtcgatgtgtctcacgaggatcccgaagtgaagttcaattggtacgtggacggcgtggaagtgcacaacgccaagaccaagcctagagaggaacagtacaactccacctacagagtggtgtccgtgctgacagtgctgcaccaggattggctgaacggcaaagagtacaagtgcaaggtgtccaacaaggccctgcctgctcctatcgaaaagaccatcagcaaggccaagggccagcctagggaaccccaggtttacaccctgcctccatgccgggaagagatgaccaagaaccaggtgtccctgtggtgtctggtcaagggcttctacccctccgatatcgccgtggaatgggagtctaatggccagcctgagaacaactacaagaccacacctccagtgctggactccgacggctcattcttcctgtactccaagctgactgtggacaagtccagatggcagcagggcaacgtgttctcctgctccgtgatgcacgaggccctgcacaatcactacacccagaagtccctgtctctgtctcccggaaaaggtggcggaggatctggcggaggcggaagtggcggtggtggaagcggtggtggcggatctattcctccacacgtgcagaaatccgtgaacaacgacatgatcgtgaccgacaacaatggcgccgtgaagttccctcagctgtgcaagttctgcgacgtgcggttctctacctgcgacaaccagaaatcctgcatgtccaactgctccatcacctccatctgcgagaagccccaagaagtgtgcgtcgccgtctggcggaagaacgacgagaacatcaccctggaaacagtgtgccacgatcctaagctgccctaccacgacttcatcctggaagatgccgcctctcctaagtgcatcatgaaggaaaagaagaagcccggcgagactttcttcatgtgcagctgctcctccgacgagtgcaacgacaacatcatcttctccgaagagtataacaccagcaatcccgac

SEQ ID NO: 138 - DNA, 360 bp, Artificial Sequence
  source: /note="Description of Artificial Sequence: Synthetic polynucleotide"
caggtgcagctggttcaatctggcggcggagttgtgcagcctggcagatctctgagactgtcttgtgccgcctccggcttcaccttctcctcttacgctatgcactgggtccgacaggcccctggcaaaggattggaatgggtcgccgtgattccctactacggctccaacaagtactacgccgactccgtgaagggcagattcaccatctctcgggacaactccaagaacaccctgtacctgcagatgaactccctgagagccgaggacaccgccgtgtactactgtgccagagagctggactacggcgattacggcctggatgtgtggggcaagggcaccacagtgacagtttctagc

SEQ ID NO: 139 - protein, 108 aa, Artificial Sequence
  source: /note="Description of Artificial Sequence: Synthetic polypeptide"
SYVLTQPPSVSVAPGKTARITCGGNNIGSKSVHWYQQKPGQAPVLVVYDDSDRPSGIPERFSGSNSGNTATLTISRVEAGDEADYYCQVWDSSSDHVVFGGGTQLTVL

SEQ ID NO: 140 - DNA, 324 bp, Artificial Sequence
  source: /note="Description of Artificial Sequence: Synthetic polynucleotide"
tcttacgtgctgacccagcctccttccgtgtctgtggctcctggcaagaccgccagaatcacctgtggcggcaacaacatcggctccaagtccgtgcactggtatcagcagaagccaggccaggctcctgtgctggtggtgtacgacgactccgatagaccctctggcatccctgagcggttctccggctctaactctggcaacaccgctacactgaccatctccagagtggaagctggcgacgaggccgactactactgccaagtgtgggactcctcctccgatcacgtggtgtttggcggaggcacacagctgaccgtgctg

SEQ ID NO: 141-191 - skipped (51 entries)

SEQ ID NO: 192 - protein, 481 aa, Artificial Sequence
  source: /note="Description of Artificial Sequence: Synthetic polypeptide"
  VARIANT (330)..(330): /replace=" "
  SITE (1)..(481): /note="Variant residues given in the sequence have no preference with respect to those in the annotations for variant positions"
ASTKGPSVFPLAPSSKSTSGGTAALGCLVKDYFPEPVTVSWNSGALTSGVHTFPAVLQSSGLYSLSSVVTVPSSSLGTQTYICNVNHKPSNTKVDKRVEPKSCDKTHTCPPCPAPELLGGPSVFLFPPKPKDTLMISRTPEVTCVVVDVSHEDPEVKFNWYVDGVEVHNAKTKPREEQYNSTYRVVSVLTVLHQDWLNGKEYKCKVSNKALPAPIEKTISKAKGQPREPQVCTLPPSREEMTKNQVSLSCAVKGFYPSDIAVEWESNGQPENNYKTTPPVLDSDGSFFLVSKLTVDKSRWQQGNVFSCSVMHEALHNHYTQKSLSLSPGKGGGGSGGGGSGGGGSIPPHVQKSVNNDMIVTDNNGAVKFPQLCKFCDVRFSTCDNQKSCMSNCSITSICEKPQEVCVAVWRKNDENITLETVCHDPKLPYHDFILEDAASPKCIMKEKKKPGETFFMCSCSSDECNDNIIFSEEYNTSNPD

SEQ ID NO: 193 - protein, 481 aa, Artificial Sequence
  source: /note="Description of Artificial Sequence: Synthetic polypeptide"
  VARIANT (330)..(330): /replace=" "
  SITE (1)..(481): /note="Variant residues given in the sequence have no preference with respect to those in the annotations for variant positions"
ASTKGPSVFPLAPSSKSTSGGTAALGCLVKDYFPEPVTVSWNSGALTSGVHTFPAVLQSSGLYSLSSVVTVPSSSLGTQTYICNVNHKPSNTKVDKRVEPKSCDKTHTCPPCPAPELLGGPSVFLFPPKPKDTLMISRTPEVTCVVVDVSHEDPEVKFNWYVDGVEVHNAKTKPREEQYNSTYRVVSVLTVLHQDWLNGKEYKCKVSNKALPAPIEKTISKAKGQPREPQVYTLPPCREEMTKNQVSLWCLVKGFYPSDIAVEWESNGQPENNYKTTPPVLDSDGSFFLYSKLTVDKSRWQQGNVFSCSVMHEALHNHYTQKSLSLSPGKGGGGSGGGGSGGGGSIPPHVQKSVNNDMIVTDNNGAVKFPQLCKFCDVRFSTCDNQKSCMSNCSITSICEKPQEVCVAVWRKNDENITLETVCHDPKLPYHDFILEDAASPKCIMKEKKKPGETFFMCSCSSDECNDNIIFSEEYNTSNPD

SEQ ID NO: 194 - protein, 378 aa, Artificial Sequence
  source: /note="Description of Artificial Sequence: Synthetic polypeptide"
  VARIANT (227)..(227): /replace=" "
  SITE (1)..(378): /note="Variant residues given in the sequence have no preference with respect to those in the annotations for variant positions"
DKTHTCPPCPAPELLGGPSVFLFPPKPKDTLMISRTPEVTCVVVDVSHEDPEVKFNWYVDGVEVHNAKTKPREEQYNSTYRVVSVLTVLHQDWLNGKEYKCKVSNKALPAPIEKTISKAKGQPREPQVCTLPPSREEMTKNQVSLSCAVKGFYPSDIAVEWESNGQPENNYKTTPPVLDSDGSFFLVSKLTVDKSRWQQGNVFSCSVMHEALHNHYTQKSLSLSPGKGGGGSGGGGSGGGGSIPPHVQKSVNNDMIVTDNNGAVKFPQLCKFCDVRFSTCDNQKSCMSNCSITSICEKPQEVCVAVWRKNDENITLETVCHDPKLPYHDFILEDAASPKCIMKEKKKPGETFFMCSCSSDECNDNIIFSEEYNTSNPD

SEQ ID NO: 195 - protein, 378 aa, Artificial Sequence
  source: /note="Description of Artificial Sequence: Synthetic polypeptide"
  VARIANT (227)..(227): /replace=" "
  SITE (1)..(378): /note="Variant residues given in the sequence have no preference with respect to those in the annotations for variant positions"
DKTHTCPPCPAPELLGGPSVFLFPPKPKDTLMISRTPEVTCVVVDVSHEDPEVKFNWYVDGVEVHNAKTKPREEQYNSTYRVVSVLTVLHQDWLNGKEYKCKVSNKALPAPIEKTISKAKGQPREPQVYTLPPCREEMTKNQVSLWCLVKGFYPSDIAVEWESNGQPENNYKTTPPVLDSDGSFFLYSKLTVDKSRWQQGNVFSCSVMHEALHNHYTQKSLSLSPGKGGGGSGGGGSGGGGSIPPHVQKSVNNDMIVTDNNGAVKFPQLCKFCDVRFSTCDNQKSCMSNCSITSICEKPQEVCVAVWRKNDENITLETVCHDPKLPYHDFILEDAASPKCIMKEKKKPGETFFMCSCSSDECNDNIIFSEEYNTSNPD

SEQ ID NO: 196 - protein, 481 aa, Artificial Sequence
  source: /note="Description of Artificial Sequence: Synthetic polypeptide"
  VARIANT (481)..(481): /replace=" "
  SITE (1)..(481): /note="Variant residues given in the sequence have no preference with respect to those in the annotations for variant positions"
IPPHVQKSVNNDMIVTDNNGAVKFPQLCKFCDVRFSTCDNQKSCMSNCSITSICEKPQEVCVAVWRKNDENITLETVCHDPKLPYHDFILEDAASPKCIMKEKKKPGETFFMCSCSSDECNDNIIFSEEYNTSNPDGGGGSGGGGSGGGGSASTKGPSVFPLAPSSKSTSGGTAALGCLVKDYFPEPVTVSWNSGALTSGVHTFPAVLQSSGLYSLSSVVTVPSSSLGTQTYICNVNHKPSNTKVDKRVEPKSCDKTHTCPPCPAPELLGGPSVFLFPPKPKDTLMISRTPEVTCVVVDVSHEDPEVKFNWYVDGVEVHNAKTKPREEQYNSTYRVVSVLTVLHQDWLNGKEYKCKVSNKALPAPIEKTISKAKGQPREPQVCTLPPSREEMTKNQVSLSCAVKGFYPSDIAVEWESNGQPENNYKTTPPVLDSDGSFFLVSKLTVDKSRWQQGNVFSCSVMHEALHNHYTQKSLSLSPGK

SEQ ID NO: 197 - protein, 481 aa, Artificial Sequence
  source: /note="Description of Artificial Sequence: Synthetic polypeptide"
  VARIANT (481)..(481): /replace=" "
  SITE (1)..(481): /note="Variant residues given in the sequence have no preference with respect to those in the annotations for variant positions"
IPPHVQKSVNNDMIVTDNNGAVKFPQLCKFCDVRFSTCDNQKSCMSNCSITSICEKPQEVCVAVWRKNDENITLETVCHDPKLPYHDFILEDAASPKCIMKEKKKPGETFFMCSCSSDECNDNIIFSEEYNTSNPDGGGGSGGGGSGGGGSASTKGPSVFPLAPSSKSTSGGTAALGCLVKDYFPEPVTVSWNSGALTSGVHTFPAVLQSSGLYSLSSVVTVPSSSLGTQTYICNVNHKPSNTKVDKRVEPKSCDKTHTCPPCPAPELLGGPSVFLFPPKPKDTLMISRTPEVTCVVVDVSHEDPEVKFNWYVDGVEVHNAKTKPREEQYNSTYRVVSVLTVLHQDWLNGKEYKCKVSNKALPAPIEKTISKAKGQPREPQVYTLPPCREEMTKNQVSLWCLVKGFYPSDIAVEWESNGQPENNYKTTPPVLDSDGSFFLYSKLTVDKSRWQQGNVFSCSVMHEALHNHYTQKSLSLSPGK

SEQ ID NO: 198 - protein, 257 aa, Artificial Sequence
  source: /note="Description of Artificial Sequence: Synthetic polypeptide"
IPPHVQKSVNNDMIVTDNNGAVKFPQLCKFCDVRFSTCDNQKSCMSNCSITSICEKPQEVCVAVWRKNDENITLETVCHDPKLPYHDFILEDAASPKCIMKEKKKPGETFFMCSCSSDECNDNIIFSEEYNTSNPDGGGGSGGGGSGGGGSGQPKANPTVTLFPPSSEELQANKATLVCLISDFYPGAVTVAWKADGSPVKAGVETTKPSKQSNNKYAASSYLSLTPEQWKSHRSYSCQVTHEGSTVEKTVAPTECS

SEQ ID NO: 199 - protein, 258 aa, Artificial Sequence
  source: /note="Description of Artificial Sequence: Synthetic polypeptide"
IPPHVQKSVNNDMIVTDNNGAVKFPQLCKFCDVRFSTCDNQKSCMSNCSITSICEKPQEVCVAVWRKNDENITLETVCHDPKLPYHDFILEDAASPKCIMKEKKKPGETFFMCSCSSDECNDNIIFSEEYNTSNPDGGGGSGGGGSGGGGSRTVAAPSVFIFPPSDEQLKSGTASVVCLLNNFYPREAKVQWKVDNALQSGNSQESVTEQDSKDSTYSLSSTLTLSKADYEKHKVYACEVTHQGLSSPVTKSFNRGEC

SEQ ID NO: 200-236 - skipped (37 entries)

SEQ ID NO: 237 - protein, 133 aa, Artificial Sequence
  source: /note="Description of Artificial Sequence: Synthetic polypeptide"
APTSSSTKKTQLQLEHLLLDLQMILNGINNYKNPKLTRMLTFKFYMPKKATELKHLQCLEEELKPLEEVLNLAQSKNFHLRPRDLISNINVIVLELKGSETTFMCEYADETATIVEFLNRWITFAQSIISTLT

SEQ ID NO: 238 - protein, 133 aa, Artificial Sequence
  source: /note="Description of Artificial Sequence: Synthetic polypeptide"
APASSSTKKTQLQLEHLLLDLQMILNGINNYKNPKLTRMLTAKFAMPKKATELKHLQCLEEELKPLEEVLNGAQSKNFHLRPRDLISNINVIVLELKGSETTFMCEYADETATIVEFLNRWITFAQSIISTLT

SEQ ID NO: 239 - protein, 518 aa, Artificial Sequence
  source: /note="Description of Artificial Sequence: Synthetic polypeptide"
IWELKKDVYVVELDWYPDAPGEMVVLTCDTPEEDGITWTLDQSSEVLGSGKTLTIQVKEFGDAGQYTCHKGGEVLSHSLLLLHKKEDGIWSTDILKDQKEPKNKTFLRCEAKNYSGRFTCWWLTTISTDLTFSVKSSRGSSDPQGVTCGAATLSAERVRGDNKEYEYSVECQEDSACPAAEESLPIEVMVDAVHKLKYENYTSSFFIRDIIKPDPPKNLQLKPLKNSRQVEVSWEYPDTWSTPHSYFSLTFCVQVQGKSKREKKDRVFTDKTSATVICRKNASISVRAQDRYYSSSWSEWASVPCSGGGGSGGGGSGGGGSRNLPVATPDPGMFPCLHHSQNLLRAVSNMLQKARQTLEFYPCTSEEIDHEDITKDKTSTVEACLPLELTKNESCLNSRETSFITNGSCLASRKTSFMMALCLSSIYEDLKMYQVEFKTMNAKLLMDPKRQIFLDQNMLAVIDELMQALNFNSETVPQKSSLEEPDFYKTKIKLCILLHAFRIRAVTIDRVMSYLNAS

SEQ ID NO: 240 - protein, 340 aa, Artificial Sequence
  source: /note="Description of Artificial Sequence: Synthetic polypeptide"
SPGQGTQSENSCTHFPGNLPNMLRDLRDAFSRVKTFFQMKDQLDNLLLKESLLEDFKGYLGCQALSEMIQFYLEEVMPQAENQDPDIKAHVNSLGENLKTLRLRLRRCHRFLPCENKSKAVEQVKNAFNKLQEKGIYKAMSEFDIFINYIEAYMTMKIRNGGGGSGGGGSGGGGSGGGGSSPGQGTQSENSCTHFPGNLPNMLRDLRDAFSRVKTFFQMKDQLDNLLLKESLLEDFKGYLGCQALSEMIQFYLEEVMPQAENQDPDIKAHVNSLGENLKTLRLRLRRCHRFLPCENKSKAVEQVKNAFNKLQEKGIYKAMSEFDIFINYIEAYMTMKIRN

SEQ ID NO: 241 - protein, 166 aa, Artificial Sequence
  source: /note="Description of Artificial Sequence: Synthetic polypeptide"
SPGQGTQSENSCTHFPGNLPNMLRDLRDAFSRVKTFFQMKDQLDNLLLKESLLEDFKGYLGCQALSEMIQFYLEEVMPQAENQDPDIKAHVNSLGENLKTLRLRLRRCHRFLPCENGGGSGGKSKAVEQVKNAFNKLQEKGIYKAMSEFDIFINYIEAYMTMKIRN

SEQ ID NO: 242 - protein, 114 aa, Artificial Sequence
  source: /note="Description of Artificial Sequence: Synthetic polypeptide"
NWVNVISDLKKIEDLIQSMHIDATLYTESDVHPSCKVTAMKCFLLELQVISLASGDASIHDTVENLIILANNSLSSNGAVTESGCKECEELEEKNIKEFLQSFVHIVQMFINTS

SEQ ID NO: 243 - protein, 114 aa, Homo sapiens
NWVNVISDLKKIEDLIQSMHIDATLYTESDVHPSCKVTAMKCFLLELQVISLESGDASIHDTVENLIILANNSLSSNGNVTESGCKECEELEEKNIKEFLQSFVHIVQMFINTS

SEQ ID NO: 244 - protein, 77 aa, Homo sapiens
MAPRRARGCRTLGLPALLLLLLLRPPATRGITCPPPMSVEHADIWVKSYSLYSRERYICNSGFKRKAGTSSLTECVL

SEQ ID NO: 245 - protein, 20 aa, Artificial Sequence
  source: /note="Description of Artificial Sequence: Synthetic peptide"
SGGSGGGGSGGGSGGGGSLQ

SEQ ID NO: 246 - protein, 133 aa, Homo sapiens [sequence omitted]

SEQ ID NO: 247 - protein, 157 aa, Homo sapiens
YFGKLESKLSVIRNLNDQVLFIDQGNRPLFEDMTDSDCRDNAPRTIFIISMYKDSQPRGMAVTISVKCEKISTLSCENKIISFKEMNPPDNIKDTKSDIIFFQRSVPGHDNKMQFESSSYEGYFLACEKERDLFKLILKKEDELGDRSIMFTVQNED

SEQ ID NO: 248 - protein, 133 aa, Homo sapiens [sequence omitted]

SEQ ID NO: 249 - protein, 138 aa, Homo sapiens
QDPYVKEAENLKKYFNAGHSDVADNGTLFLGILKNWKEESDRKIMQSQIVSFYFKLFKNFKDDQSIQKSVETIKEDMNVKFFNSNKKKRDDFEKLTNYSVTDLNVQRKAIHELIQVMAELSPAAKTGKRKRSQMLFRG

SEQ ID NO: 250 - DNA, 357 bp, Artificial Sequence
  source: /note="Description of Artificial Sequence: Synthetic polynucleotide"
gaagtgcagctggtcgaaagcggagggggtctggtccagcctggagggtccctgcggctgtcctgcgccgcttccggcttcaccttctccaacgatgaaatgaactggatccgccaagcccctggaaagggcctggaatgggtgtcgtacatctcgagcaggtccagcactatctactatgccgacgcggtgaagggacgcttcactatcagccgcgataacgcacgcaattccctctacctgcagatgaactcgctcagagctgaggatactgccgtctactactgcgcccgcggcgtggacggcgatttttccttcgattactggggacagggcactcttgtcaccgtgtcaagc

SEQ ID NO: 251 - DNA, 357 bp, Artificial Sequence
  source: /note="Description of Artificial Sequence: Synthetic polynucleotide"
gaagtccaactcgtggaaagcggcggtggcctggtgcagccgggaggctccctccggctgtcgtgtgcagccagcgggttcaccttctccaacgacgaaatgaactggattcgccaggcgccgggaaaggggctggaatgggtgtcgtacatttcaagcgggtcctccaccatttactacgccgatgcagtcaagggccgcttcaccatctcgcgcgacaacgctcggaactccctctatctgcagatgaacagcctgagagcggaagacaccgccgtctactactgcgcccgcggagtggacggcgacttctccttcgactactggggtcagggaaccctggtgactgtgtcctca

SEQ ID NO: 252 - DNA, 357 bp, Artificial Sequence
  source: /note="Description of Artificial Sequence: Synthetic polynucleotide"
gaggtgcagctggtggaatcggggggtggcctcgtgcagcccggagggtcgctccggctgtcctgtgccgctagcggattcacattctcgaatgacgagatgaactggattcggcaggccccaggcaagggcctggaatgggtgagcttcatttcgggcgggtcctcaaccatctactacgccgacgccgtcaaggggcgctttactatctcccgcgacaatgcacggaactccctctacctgcaaatgaacagcctgagggcggaagatacagctgtgtactactgcgcccggggcgtggacggagacttctccttcgactactggggtcagggaaccctggtgacagtgtcttcc

SEQ ID NO: 253 - DNA, 357 bp, Artificial Sequence
  source: /note="Description of Artificial Sequence: Synthetic polynucleotide"
gaagtgcagctcgtggagtctggaggtggtctggtgcagccgggtggttccctgaggctgtcctgcgccgccagcggcttcaccttctcaaatgacgaaatgaactggattcggcaggcccctggcaagggcctggagtgggtgtcgtacatctcctcccgcagctccaccatctactacgccgacgcagtcaaggggaggttcaccatctcccgggacaacgcccggaactcactgtacctgcagatgaactccctgagagctgaggacactgccgtctactactgcgctagaaactccgatgaggacggaagcttcgactactggggccagggaactctggtgacagtctcgagc

SEQ ID NO: 254 - DNA, 357 bp, Artificial Sequence
  source: /note="Description of Artificial Sequence: Synthetic polynucleotide"
gaggtgcagctcgtggaaagcgggggcggcctggtccagcctggaggatccctgagactttcctgtgctgcttccgggttcaccttcagcaatgatgagatgaactggattcggcaagccccgggcaagggcctggaatgggtcagctacatcacgtctaagtcctccaccatctactatgccgactccgtgaagggacgctttaccatctcacgcgacaacgcgcggaacagcctttacctgcagatgaactcactgcgcgccgaagataccgccgtgtactactgcgctcgcggagtggatggagatttttccttcgattactggggacaaggcaccctggtgaccgtcagctcc

SEQ ID NO: 255 - DNA, 357 bp, Artificial Sequence
  source: /note="Description of Artificial Sequence: Synthetic polynucleotide"
gaagtccagctcgtcgaatctggtgggggactggtccagccgggaggatccctccggctgtcgtgcgcggcatccgggttcaccttctccaacgatgagatgaattggattcgccaggccccaggaaaggggctggagtgggtctcgtacatctcatcccgcagctctactatctactacgccgatgctgtcaagggccggttcactatctcccgcgataacgcccggaactccctctacctccagatgaactcactgcgcgcggaagacaccgccgtctactactgcgcacggggcgtcgatggagatttctccttcgatgtgtggggtcagggaacactggtgaccgtgtcctcc

SEQ ID NO: 256 - DNA, 357 bp, Artificial Sequence
  source: /note="Description of Artificial Sequence: Synthetic polynucleotide"
gaggtgcagctcgtggagtccggtggaggactggtgcagcccggcggatcgctgagactgtcttgcgccgcctcgggattcacgttctccaacgatgaaatgaactggattagacaggctccgggcaagggcctggaatgggtgtcctacattacttcgaagtcctccaccatttactacgcagacgccgtgaagggccgcttcaccatttcccgcgacaacgcaagaaactcgctgtacctgcagatgaactccctgcgcgcggaggacaccgccgtgtactactgtgccagaggagtcgatggcgatttctcgttcgactactggggacagggcactcttgtgactgtctcctcc

SEQ ID NO: 257 - DNA, 357 bp, Artificial Sequence
  source: /note="Description of Artificial Sequence: Synthetic polynucleotide"
gaggtccagctggtcgaatcggggggaggcctcgtgcagcctggagggtccctccggctttcctgtgccgcttccggattcaccttcagcaacgatgagatgaactggatcaggcaggccccgggaaaggggctcgagtgggtgtcctacatctccagccggtcctcgaccatctactacgccgatgccgtgaaggggagatttactatctcccgcgacaatgcacggaactcactgtacctccagatgaactcactgcgggccgaggacaccgcagtgtactactgcgcgcggtccgtggatggcgacgggagcttcgattactggggacaggggaccctggtgaccgtgtcgtcc

SEQ ID NO: 258 - DNA, 357 bp, Artificial Sequence
  source: /note="Description of Artificial Sequence: Synthetic polynucleotide"
gaggtgcagctcgtggaatccggaggtggactggtgcagccggggggtagcctgcggctgtcctgtgcagcttccgggttcaccttctccaacgacgaaatgaactggatccgccaggccccgggcaagggactcgaatgggtgtcctacatctcctcccgctcctccactatctactatgccgatgccgtcaagggccgcttcaccatttctcgcgacaacgcccggaactccctgtacctccagatgaactccctgcgcgccgaggacactgccgtctactactgcgcgaggtcgtccgacggatccacctccttcgactactgggggcaaggaactctcgtgaccgtgtcctcc

SEQ ID NO: 259 - DNA, 357 bp, Artificial Sequence
  source: /note="Description of Artificial Sequence: Synthetic polynucleotide"
gaagtgcaacttgtcgaaagtggtgggggcctggtgcagcctgggggctccctgcggctgtcctgcgccgcctccggattcactttctccaacgacgagatgaactggattagacaggctcctggaaagggtctcgaatgggtgtcctacattagctcatcttccagcaccatctactacgccgacgcagtgaccggaaggttcaccatctcgagggacaacgcccgcaactccctctacctgcagatgaactcgctgcgcgcggaggacaccgctgtgtactactgcgcccgcggcgtggacggagacttctccttcgactactggggacagggaactcttgtgaccgtgagcagc

SEQ ID NO: 260 - DNA, 357 bp, Artificial Sequence
  source: /note="Description of Artificial Sequence: Synthetic polynucleotide"
gaagtgcaactggtggaatcgggaggcggcctggtgcaacctggcggtagcctgcggctgagctgcgccgcctcaggcttcaccttttccaacgacgaaatgaactggatcagacaggcgcctggcaaaggactggagtgggtgtcctacatctcgtccaggtcaagcaccatttattacgcggacgccgtgaaagggagattcaccatcagcagagacaacgcccggaactccctctacctgcagatgaactccctgagggccgaggacaccgcagtgtactactgtgccagaaactccgactccgatggaagcttcgacatctggggacaggggaccctggtgactgtgtcgtcc

SEQ ID NO: 261 - DNA, 357 bp, Artificial Sequence
  source: /note="Description of Artificial Sequence: Synthetic polynucleotide"
gaagtgcagctggtcgaatcggggggaggactggtccagcctggagggtccctccgcctgagctgcgccgcctccggattcaccttttccaacgacgagatgaactggatcaggcaggccccgggcaaggggctggaatgggtgtcatacatctccagccgctcatcgacaatttactacgccgatgccgtgaagggtagatttaccatctcccgggacaatgcccgaaacagcctgtatctgcaaatgaactccctgcgggcggaggataccgctgtctactactgtgccagaggcgtggatggggacttcagctttgacttttggggacagggcaccctcgtcaccgtgagcagc

SEQ ID NO: 262 - DNA, 357 bp, Artificial Sequence
  source: /note="Description of Artificial Sequence: Synthetic polynucleotide"
gaggtgcagctggtggagtccggaggcggccttgtccagccgggcgggtctctgcggctgtcatgtgcggcctcgggattcactttttccaacgacgaaatgaactggatccgccaggcccctgggaaggggcttgaatgggtgagctacatctcctcacggtcctccactatctattacgccgacgctgtgaagggccgcttcactatctcacgcgacaatgccaggaactctctctacctgcagatgaactccctgcgggccgaagataccgcggtgtactactgtgcccgctcgggccggctggacgggtcattcgactactggggacaagggaccctggtcaccgtctcctct

SEQ ID NO: 263 - DNA, 357 bp, Artificial Sequence
  source: /note="Description of Artificial Sequence: Synthetic polynucleotide"
gaagtccagctggtcgagtccggcggtgggctggtccagcccggcggatcgctgcgcctgtcctgtgccgcctccggcttcaccttctccaacgacgagatgaactggatcagacaggcccccggtaagggactggagtgggtgagctacatctcctcgcgcagctccaccatctactacgccgacgccgtgaagggaaggttcaccatcagcagagataacgcgcggaacagcctgtacctgcagatgaactcactgcgggctgaagacacagccgtctattactgtgccagaggagtggaatccgatttcagcttcgactactggggacaaggaactctggtcacggtcagctcc

SEQ ID NO: 264 - DNA, 360 bp, Artificial Sequence
  source: /note="Description of Artificial Sequence: Synthetic polynucleotide"
caggtgcagcttgtgcaaagcgggggaggcgtggtgcagccgggacggagcctgcggctgtcgtgcgccgcgagcggtttcaccttctcctcctacgctatgcactgggtccgccaggcgccgggcaagggcctcgaatgggtggccgtgatcagctacgatggctccaacaagtactacgccgactcagtgaagggaaggttcaccatctcaagagataacagcaagaacacgctgtacctccagatgaactccctccgggccgaagacacagccgtctactactgtgcgagagagctcgattacggcgattacggcctggacgtgtggggcaagggaaccacggtgaccgtctcctcc

SEQ ID NO: 265 - DNA, 360 bp, Artificial Sequence
  source: /note="Description of Artificial Sequence: Synthetic polynucleotide"
caagtgcagctcgtgcagtcaggcggtggcgtggtgcagcccggccggtctctgaggctcagctgcgccgcctcgggcttcaccttctcgtcatacgccatgcactgggtgcgccaggcccccgggaagggactggaatgggtcgccgtgatctcctacgatggatcgaacaagtactacgccgactccgtgaaggggcggttcaccatctcccgcgacaactccaagaacaccctttatctgcaaatgaactcgctcagagcagaggacaccgctgtgtactactgcgccagagagctggactacggtgattggggactggacgtgtggggcaagggtaccaccgtgactgtgtcgtcc

SEQ ID NO: 266 - DNA, 360 bp, Artificial Sequence
  source: /note="Description of Artificial Sequence: Synthetic polynucleotide"
caagtgcaactggtgcaatccggagggggtgtggtccaaccgggacgcagcctgcggctgtcctgcgccgccagcggcttcacattctcctcctacgccatgcactgggtccgccaggcgccaggtaagggactcgaatgggtggcagtgatcccttactacggatcaaacaagtattacgccgattccgtgaagggccgcttcaccatcagcagagacaactccaagaacaccctctacctgcagatgaactcccttcgcgccgaggataccgccgtctactactgcgcccgcgagctggactacggtgactacggactcgatgtgtggggaaagggtaccactgtgaccgtgagctcc

SEQ ID NO: 267 - DNA, 360 bp, Artificial Sequence
  source: /note="Description of Artificial Sequence: Synthetic polynucleotide"
caggtgcaactggtccagtcgggcggaggagtggtccagccgggtaggtcactgcggctgtcatgtgccgctagcggattcactttctcttcctacgcaatgcactgggtgagacaagcccctggcaagggactggagtgggtcgccgtgatctcgtatgacgggtccgataagtactacgctgattccgtgaagggacgcttcacgatcagccgcgacaactccaaaaacactctctacctgcaaatgaattcccttcgcgccgaagatactgcagtgtactactgcgccagagagctggactacggagactacggcctggacgtgtggggcaagggcaccactgtgaccgtctcctcc

SEQ ID NO: 268 - DNA, 333 bp, Artificial Sequence
  source: /note="Description of Artificial Sequence: Synthetic polynucleotide"
caactggtgctgacccagcccccttccgtctccggcgccccgggccagcgcgtcactatctcctgtaccggcagctccagcaacatcggagcaggatacgacgtgcactggtaccaacagctccccggaaccgcgcctaagctgctgatctacgggaactctaaccggccgtccggcgtgcctgaccgcttcagcggatcgaagtccggcaccagcgcctccctggccatcactggactgcaggccgaggacgaagccgattactactgccagtcctacgactcctccctgtccgaggaagtgttcggaggcgggacgaagctcaccgtcctg

SEQ ID NO: 269 - DNA, 324 bp, Artificial Sequence
  source: /note="Description of Artificial Sequence: Synthetic polynucleotide"
tccctcgtgctgacccaacctccttcagtctccgtggcccccggcaagaccgcccgcatcacctgtggcggtaacaacatcggctccaagtcagtccactggtaccagcagaagccgggccaagctcccgtgctggtcgtgtacgacgactcagaccgccccagcggtatccctgagagatttagcggatccaactccgggaacaccgctaccctgaccatctcaagggtggaggccggagacgaagccgactactactgccaggtgtgggattccagctccgaccacgtggtgttcggcggcggcactcagctcaccgtgctg

SEQ ID NO: 270 - DNA, 351 bp, Artificial Sequence
  source: /note="Description of Artificial Sequence: Synthetic polynucleotide"
gaagtgcagctggtggaaagcggtggcggtctggtgcagcctggcggttccctccggctgtcatgtgctgcctccggattctcgttcaacgcgtatgccatgaactgggtgaggcaggccccgggaaagggactggaatgggtggggagaatccggaccaagaacaataactacgctacttactacgccgactccgtcaaggaccggttcacaatttcccgggacgacagcaagagctcactgtaccttcagatgaacagcctcaaaaccgaggacaccgccgtgtactactgtgccaccttttacggcaacggtgtgtggggacagggaacaactgtcaccgtgtcctcc

SEQ ID NO: 271 - DNA, 351 bp, Artificial Sequence
  source: /note="Description of Artificial Sequence: Synthetic polynucleotide"
gaggtgcagctggttgaatctggcggaggattggttcagcctggcggctctctgagactgtcttgtgccgcctctggcttctccttcaacgcctacgccatgaactgggtccgacaggctcctggcaaaggcctggaatgggtcggaagaatccggaccaagaacaacaactacgccacctactacgccgactccgtgaaggaccggttcaccatctctcgggacgactccaagtccagcctgtacctgcagatgaactccctgaaaaccgaggacaccgccgtgtactactgcgccaccttttacggcaatggcgtgtggggccagggcaccacagttacagtttcttcc

SEQ ID NO: 272 - DNA, 336 bp, Artificial Sequence
  source: /note="Description of Artificial Sequence: Synthetic polynucleotide"
gacgtcgtcatgacccaatccccgctctccctgccggtgactctcggccagccggcgtccatctcgtgcaagtcctcccaatccctgctggattcggatgggaagactttcctgaactggctgcagcaacggcccggccagtcgccacggcggctgatctacctggtgtccaagctggattcaggtgtgcctgatagattctccggcagcggatcggggaccgacttcacgctgaagatctccagagtggaagcagaggacgtgggcgtctattactgttggcaggggactcatttcccctatacctttggaggtggtactaaggtggaaattaag

SEQ ID NO: 273 - DNA, 357 bp, Artificial Sequence
  source: /note="Description of Artificial Sequence: Synthetic polynucleotide"
caggtgcagctggttcagtctggcgccgaagtgaagaaacctggctcctccgtgaaggtgtcctgcaaggcttctggcggcaccttctcctcttacgccatctcctgggtccgacaggctcctggacaaggcttggaatggatgggcggcatcatccccatcttcggcaccgccaattacgcccagaaattccagggcagagtgaccatcaccgccgacaagtctacctccaccgcctacatggaactgtccagcctgagatctgaggacaccgccgtgtactactgtgccagaggcggctactcttacggctccctggattattggggccagggcacactggtcaccgtgtcctct

SEQ ID NO: 274 - DNA, 321 bp, Artificial Sequence
  source: /note="Description of Artificial Sequence: Synthetic polynucleotide"
gacatccagatgacccagtctccatcctctctgtccgcctctgtgggcgacagagtgaccatcacctgtcgggcctctcagtccatcatctccgacctgaactggtatcagcagaagcccggcaaggcccctaagctgctgatccatgctgcttccagtctgcagtctggcgtgccctctagattctccggctctggctctggcaccgactttaccctgacaatctccagcctgcagcctgaggacttcgccacctactactgccagcagtcctacagcaccccttacacctttggccagggcaccaagctggaaatcaag

SEQ ID NO: 275 - DNA, 69 bp, Artificial Sequence
  source: /note="Description of Artificial Sequence: Synthetic oligonucleotide"
atgggccgcggacttctgcgcgggctgtggcctctgcacatcgtgctgtggacccgcatcgcgtccact

SEQ ID NO: 276 - DNA, 408 bp, Artificial Sequence
  source: /note="Description of Artificial Sequence: Synthetic polynucleotide"
attcctccacacgtgcaaaagtcggtgaacaatgatatgatcgtcaccgacaacaacggagccgtgaagtttcctcagctgtgcaagttttgtgatgtccgcttcagcacctgtgacaaccagaagtcatgcatgtcgaactgttcgatcaccagcatttgcgaaaagcctcaagaggtgtgcgtggccgtgtggcgcaagaacgacgaaaacatcactctggaaaccgtgtgccatgatcctaagctcccgtaccatgacttcattcttgaagatgcagcctcccccaagtgcatcatgaaggagaagaagaagcctggcgaaaccttcttcatgtgctcatgcagctccgacgaatgtaacgacaacatcatcttctcagaggaatacaacacctcaaacccggac

SEQ ID NO: 277 - DNA, 399 bp, Artificial Sequence
  source: /note="Description of Artificial Sequence: Synthetic polynucleotide"
gcccctaccagcagcagcaccaagaaaacccagctccagctcgagcacctcctgctggacctgcagatgatcctgaacggcatcaacaactacaagaaccccaagctgacccggatgctgaccttcaagttctacatgcccaagaaggccaccgagctgaagcacctccagtgcctggaagaggaactgaagcccctggaagaagtgctgaacctggcccagagcaagaacttccacctgaggcccagggacctgatcagcaacatcaacgtgatcgtgctggaactgaaaggcagcgagacaaccttcatgtgcgagtacgccgacgagacagccaccatcgtggaatttctgaaccggtggatcaccttctgccagagcatcatcagcaccctgaca

SEQ ID NO: 278 - DNA, 45 bp, Artificial Sequence
  source: /note="Description of Artificial Sequence: Synthetic oligonucleotide"
ggtggcggaggaagcggaggcggaggttctggcggcggaggatct

SEQ ID NO: 279 - DNA, 15 bp, Artificial Sequence
  source: /note="Description of Artificial Sequence: Synthetic oligonucleotide"
ggtggcggaggaagc

SEQ ID NO: 280 - DNA, 1407 bp, Artificial Sequence
  source: /note="Description of Artificial Sequence: Synthetic polynucleotide"
atggaaaccgacacactgctgctgtgggtgctgctcttgtgggtgccaggatctacaggagaagtgcagctggtcgaaagcggagggggtctggtccagcctggagggtccctgcggctgtcctgcgccgcttccggcttcaccttctccaacgatgaaatgaactggatccgccaagcccctggaaagggcctggaatgggtgtcgtacatctcgagcaggtccagcactatctactatgccgacgcggtgaagggacgcttcactatcagccgcgataacgcacgcaattccctctacctgcagatgaactcgctcagagctgaggatactgccgtctactactgcgcccgcggcgtggacggcgatttttccttcgattactggggacagggcactcttgtcaccgtgtcaagcgcttctaccaagggacccagcgtgttccctctggctccttccagcaagtctacctctggcggaacagctgctctgggctgcctggtcaaggactactttcctgagcctgtgaccgtgtcttggaactctggcgctctgacatccggcgtgcacacatttccagctgtgctgcagtcctccggcctgtactctctgtcctctgtcgtgaccgtgccttccagctctctgggaacccagacctacatctgcaatgtgaaccacaagccttccaacaccaaggtggacaagagagtggaacccaagtcctgcgataagacccacacctgtcctccctgccctgcccctgaactgctgggcggacctagcgtgttcctgttccctccaaagcccaaggacaccctgatgatcagccggacccctgaagtgacctgcgtggtggtggatgtgtcccacgaggatcccgaagtgaagttcaattggtacgtggacggcgtggaagtgcacaacgccaagaccaagcccagagaggaacagtacaacagcacctaccgggtggtgtccgtgctgaccgtgctgcaccaggactggctgaacggcaaagagtacaagtgcaaggtgtccaacaaggccctgccagcccctatcgagaaaaccatcagcaaggccaagggccagcctagagagcctcaggtctgcaccctgcctcccagccgggaagagatgaccaagaaccaggtgtccctgagctgcgccgtgaagggcttctacccctccgatatcgccgtggaatgggagagcaacggccagcccgagaacaactacaagaccacccctcccgtgctggacagcgacggcagcttcttcctggtgtccaaactgaccgtggacaagagccggtggcagcagggcaatgtgttcagctgtagcgtgatgcacgaggccctgcacaaccactacacccagaagtctctgagcctgagccctggcaaa

SEQ ID NO: 281 - DNA, 1407 bp, Artificial Sequence
  source: /note="Description of Artificial Sequence: Synthetic polynucleotide"
atggaaaccgacacactgctgctgtgggtgctgctcttgtgggtgccaggatctacaggagaagtccaactcgtggaaagcggcggtggcctggtgcagccgggaggctccctccggctgtcgtgtgcagccagcgggttcaccttctccaacgacgaaatgaactggattcgccaggcgccgggaaaggggctggaatgggtgtcgtacatttcaagcgggtcctccaccatttactacgccgatgcagtcaagggccgcttcaccatctcgcgcgacaacgctcggaactccctctatctgcagatgaacagcctgagagcggaagacaccgccgtctactactgcgcccgcggagtggacggcgacttctccttcgactactggggtcagggaaccctggtgactgtgtcctcagcttctaccaagggacccagcgtgttccctctggctccttccagcaagtctacctctggcggaacagctgctctgggctgcctggtcaaggactactttcctgagcctgtgaccgtgtcttggaactctggcgctctgacatccggcgtgcacacatttccagctgtgctgcagtcctccggcctgtactctctgtcctctgtcgtgaccgtgccttccagctctctgggaacccagacctacatctgcaatgtgaaccacaagccttccaacaccaaggtggacaagagagtggaacccaagtcctgcgataagacccacacctgtcctccctgccctgcccctgaactgctgggcggacctagcgtgttcctgttccctccaaagcccaaggacaccctgatgatcagccggacccctgaagtgacctgcgtggtggtggatgtgtcccacgaggatcccgaagtgaagttcaattggtacgtggacggcgtggaagtgcacaacgccaagaccaagcccagagaggaacagtacaacagcacctaccgggtggtgtccgtgctgaccgtgctgcaccaggactggctgaacggcaaagagtacaagtgcaaggtgtccaacaaggccctgccagcccctatcgagaaaaccatcagcaaggccaagggccagcctagagagcctcaggtctgcaccctgcctcccagccgggaagagatgaccaagaaccaggtgtccctgagctgcgccgtgaagggcttctacccctccgatatcgccgtggaatgggagagcaacggccagcccgagaacaactacaagaccacccctcccgtgctggacagcgacggcagcttcttcctggtgtccaaactgaccgtggacaagagccggtggcagcagggcaatgtgttcagctgtagcgtgatgcacgaggccctgcacaaccactacacccagaagtctctgagcctgagccctggcaaa

SEQ ID NO: 282 - DNA, 1407 bp, Artificial Sequence
  source: /note="Description of Artificial Sequence: Synthetic polynucleotide"
atggaaaccgacacactgctgctgtgggtgctgctcttgtgggtgccaggatctacaggagaggtgcagctggtggaatcggggggtggcctcgtgcagcccggagggtcgctccggctgtcctgtgccgctagcggattcacattctcgaatgacgagatgaactggattcggcaggccccaggcaagggcctggaatgggtgagcttcatttcgggcgggtcctcaaccatctactacgccgacgccgtcaaggggcgctttactatctcccgcgacaatgcacggaactccctctacctgcaaatgaacagcctgagggcggaagatacagctgtgtactactgcgcccggggcgtggacggagacttctccttcgactactggggtcagggaaccctggtgacagtgtcttccgcttctaccaagggacccagcgtgttccctctggctccttccagcaagtctacctctggcggaacagctgctctgggctgcctggtcaaggactactttcctgagcctgtgaccgtgtcttggaactctggcgctctgacatccggcgtgcacacatttccagctgtgctgcagtcctccggcctgtactctctgtcctctgtcgtgaccgtgccttccagctctctgggaacccagacctacatctgcaatgtgaaccacaagccttccaacaccaaggtggacaagagagtggaacccaagtcctgcgataagacccacacctgtcctccctgccctgcccctgaactgctgggcggacctagcgtgttcctgttccctccaaagcccaaggacaccctgatgatcagccggacccctgaagtgacctgcgtggtggtggatgtgtcccacgaggatcccgaagtgaagttcaattggtacgtggacggcgtggaagtgcacaacgccaagaccaagcccagagaggaacagtacaacagcacctaccgggtggtgtccgtgctgaccgtgctgcaccaggactggctgaacggcaaagagtacaagtgcaaggtgtccaacaaggccctgccagcccctatcgagaaaaccatcagcaaggccaagggccagcctagagagcctcaggtctgcaccctgcctcccagccgggaagagatgaccaagaaccaggtgtccctgagctgcgccgtgaagggcttctacccctccgatatcgccgtggaatgggagagcaacggccagcccgagaacaactacaagaccacccctcccgtgctggacagcgacggcagcttcttcctggtgtccaaactgaccgtggacaagagccggtggcagcagggcaatgtgttcagctgtagcgtgatgcacgaggccctgcacaaccactacacccagaagtctctgagcctgagccctggcaaa

SEQ ID NO: 283 - DNA, 1407 bp, Artificial Sequence
  source: /note="Description of Artificial Sequence: Synthetic polynucleotide"
atggaaaccgacacactgctgctgtgggtgctgctcttgtgggtgccaggatctacaggagaagtgcagctcgtggagtctggaggtggtctggtgcagccgggtggttccctgaggctgtcctgcgccgccagcggcttcaccttctcaaatgacgaaatgaactggattcggcaggcccctggcaagggcctggagtgggtgtcgtacatctcctcccgcagctccaccatctactacgccgacgcagtcaaggggaggttcaccatctcccgggacaacgcccggaactcactgtacctgcagatgaactccctgagagctgaggacactgccgtctactactgcgctagaaactccgatgaggacggaagcttcgactactggggccagggaactctggtgacagtctcgagcgcttctaccaagggacccagcgtgttccctctggctccttccagcaagtctacctctggcggaacagctgctctgggctgcctggtcaaggactactttcctgagcctgtgaccgtgtcttggaactctggcgctctgacatccggcgtgcacacatttccagctgtgctgcagtcctccggcctgtactctctgtcctctgtcgtgaccgtgccttccagctctctgggaacccagacctacatctgcaatgtgaaccacaagccttccaacaccaaggtggacaagagagtggaacccaagtcctgcgataagacccacacctgtcctccctgccctgcccctgaactgctgggcggacctagcgtgttcctgttccctccaaagcccaaggacaccctgatgatcagccggacccctgaagtgacctgcgtggtggtggatgtgtcccacgaggatcccgaagtgaagttcaattggtacgtggacggcgtggaagtgcacaacgccaagaccaagcccagagaggaacagtacaacagcacctaccgggtggtgtccgtgctgaccgtgctgcaccaggactggctgaacggcaaagagtacaagtgcaaggtgtccaacaaggccctgccagcccctatcgagaaaaccatcagcaaggccaagggccagcctagagagcctcaggtctgcaccctgcctcccagccgggaagagatgaccaagaaccaggtgtccctgagctgcgccgtgaagggcttctacccctccgatatcgccgtggaatgggagagcaacggccagcccgagaacaactacaagaccacccctcccgtgctggacagcgacggcagcttcttcctggtgtccaaactgaccgtggacaagagccggtggcagcagggcaatgtgttcagctgtagcgtgatgcacgaggccctgcacaaccactacacccagaagtctctgagcctgagccctggcaaa

SEQ ID NO: 284 - DNA, 1407 bp, Artificial Sequence
  source: /note="Description of Artificial Sequence: Synthetic polynucleotide"
atggaaaccgacacactgctgctgtgggtgctgctcttgtgggtgccaggatctacaggagaggtgcagctcgtggaaagcgggggcggcctggtccagcctggaggatccctgagactttcctgtgctgcttccgggttcaccttcagcaatgatgagatgaactggattcggcaagccccgggcaagggcctggaatgggtcagctacatcacgtctaagtcctccaccatctactatgccgactccgtgaagggacgctttaccatctcacgcgacaacgcgcggaacagcctttacctgcagatgaactcactgcgcgccgaagataccgccgtgtactactgcgctcgcggagtggatggagatttttccttcgattactggggacaaggcaccctggtgaccgtcagctccgcttctaccaagggacccagcgtgttccctctggctccttccagcaagtctacctctggcggaacagctgctctgggctgcctggtcaaggactactttcctgagcctgtgaccgtgtcttggaactctggcgctctgacatccggcgtgcacacatttccagctgtgctgcagtcctccggcctgtactctctgtcctctgtcgtgaccgtgccttccagctctctgggaacccagacctacatctgcaatgtgaaccacaagccttccaacaccaaggtggacaagagagtggaacccaagtcctgcgataagacccacacctgtcctccctgccctgcccctgaactgctgggcggacctagcgtgttcctgttccctccaaagcccaaggacaccctgatgatcagccggacccctgaagtgacctgcgtggtggtggatgtgtcccacgaggatcccgaagtgaagttcaattggtacgtggacggcgtggaagtgcacaacgccaagaccaagcccagagaggaacagtacaacagcacctaccgggtggtgtccgtgctgaccgtgctgcaccaggactggctgaacggcaaagagtacaagtgcaaggtgtccaacaaggccctgccagcccctatcgagaaaaccatcagcaaggccaagggccagcctagagagcctcaggtctgcaccctgcctcccagccgggaagagatgaccaagaaccaggtgtccctgagctgcgccgtgaagggcttctacccctccgatatcgccgtggaatgggagagcaacggccagcccgagaacaactacaagaccacccctcccgtgctggacagcgacggcagcttcttcctggtgtccaaactgaccgtggacaagagccggtggcagcagggcaatgtgttcagctgtagcgtgatgcacgaggccctgcacaaccactacacccagaagtctctgagcctgagccctggcaaa

SEQ ID NO: 285 - DNA, 1407 bp, Artificial Sequence
  source: /note="Description of Artificial Sequence: Synthetic polynucleotide"
atggaaaccgacacactgctgctgtgggtgctgctcttgtgggtgccaggatctacaggagaagtccagctcgtcgaatctggtgggggactggtccagccgggaggatccctccggctgtcgtgcgcggcatccgggttcaccttctccaacgatgagatgaattggattcgccaggccccaggaaaggggctggagtgggtctcgtacatctcatcccgcagctctactatctactacgccgatgctgtcaagggccggttcactatctcccgcgataacgcccggaactccctctacctccagatgaactcactgcgcgcggaagacaccgccgtctactactgcgcacggggcgtcgatggagatttctccttcgatgtgtggggtcagggaacactggtgaccgtgtcctccgcttctaccaagggacccagcgtgttccctctggctccttccagcaagtctacctctggcggaacagctgctctgggctgcctggtcaaggactactttcctgagcctgtgaccgtgtcttggaactctggcgctctgacatccggcgtgcacacatttccagctgtgctgcagtcctccggcctgtactctctgtcctctgtcgtgaccgtgccttccagctctctgggaacccagacctacatctgcaatgtgaaccacaagccttccaacaccaaggtggacaagagagtggaacccaagtcctgcgataagacccacacctgtcctccctgccctgcccctgaactgctgggcggacctagcgtgttcctgttccctccaaagcccaaggacaccctgatgatcagccggacccctgaagtgacctgcgtggtggtggatgtgtcccacgaggatcccgaagtgaagttcaattggtacgtggacggcgtggaagtgcacaacgccaagaccaagcccagagaggaacagtacaacagcacctaccgggtggtgtccgtgctgaccgtgctgcaccaggactggctgaacggcaaagagtacaagtgcaaggtgtccaacaaggccctgccagcccctatcgagaaaaccatcagcaaggccaagggccagcctagagagcctcaggtctgcaccctgcctcccagccgggaagagatgaccaagaaccaggtgtccctgagctgcgccgtgaagggcttctacccctccgatatcgccgtggaatgggagagcaacggccagcccgagaacaactacaagaccacccctcccgtgctggacagcgacggcagcttcttcctggtgtccaaactgaccgtggacaagagccggtggcagcagggcaatgtgttcagctgtagcgtgatgcacgaggccctgcacaaccactacacccagaagtctctgagcctgagccctggcaaa

SEQ ID NO: 286 - DNA, 1407 bp, Artificial Sequence
  source: /note="Description of Artificial Sequence: Synthetic polynucleotide"
atggaaaccgacacactgctgctgtgggtgctgctcttgtgggtgccaggatctacaggagaggtgcagctcgtggagtccggtggaggactggtgcagcccggcggatcgctgagactgtcttgcgccgcctcgggattcacgttctccaacgatgaaatgaactggattagacaggctccgggcaagggcctggaatgggtgtcctacattacttcgaagtcctccaccatttactacgcagacgccgtgaagggccgcttcaccatttcccgcgacaacgcaagaaactcgctgtacctgcagatgaactccctgcgcgcggaggacaccgccgtgtactactgtgccagaggagtcgatggcgatttctcgttcgactactggggacagggcactcttgtgactgtctcctccgcttctaccaagggacccagcgtgttccctctggctccttccagcaagtctacctctggcggaacagctgctctgggctgcctggtcaaggactactttcctgagcctgtgaccgtgtcttggaactctggcgctctgacatccggcgtgcacacatttccagctgtgctgcagtcctccggcctgtactctctgtcctctgtcgtgaccgtgccttccagctctctgggaacccagacctacatctgcaatgtgaaccacaagccttccaacaccaaggtggacaagagagtggaacccaagtcctgcgataagacccacacctgtcctccctgccctgcccctgaactgctgggcggacctagcgtgttcctgttccctccaaagcccaaggacaccctgatgatcagccggacccctgaagtgacctgcgtggtggtggatgtgtcccacgaggatcccgaagtgaagttcaattggtacgtggacggcgtggaagtgcacaacgccaagaccaagcccagagaggaacagtacaacagcacctaccgggtggtgtccgtgctgaccgtgctgcaccaggactggctgaacggcaaagagtacaagtgcaaggtgtccaacaaggccctgccagcccctatcgagaaaaccatcagcaaggccaagggccagcctagagagcctcaggtctgcaccctgcctcccagccgggaagagatgaccaagaaccaggtgtccctgagctgcgccgtgaagggcttctacccctccgatatcgccgtggaatgggagagcaacggccagcccgagaacaactacaagaccacccctcccgtgctggacagcgacggcagcttcttcctggtgtccaaactgaccgtggacaagagccggtggcagcagggcaatgtgttcagctgtagcgtgatgcacgaggccctgcacaaccactacacccagaagtctctgagcctgagccctggcaaa

SEQ ID NO: 287 - DNA, 1407 bp, Artificial Sequence
  source: /note="Description of Artificial Sequence: Synthetic polynucleotide"
atggaaaccgacacactgctgctgtgggtgctgctcttgtgggtgccaggatctacaggagaggtccagctggtcgaatcggggggaggcctcgtgcagcctggagggtccctccggctttcctgtgccgcttccggattcaccttcagcaacgatgagatgaactggatcaggcaggccccgggaaaggggctcgagtgggtgtcctacatctccagccggtcctcgaccatctactacgccgatgccgtgaaggggagatttactatctcccgcgacaatgcacggaactcactgtacctccagatgaactcactgcgggccgaggacaccgcagtgtactactgcgcgcggtccgtggatggcgacgggagcttcgattactggggacaggggaccctggtgaccgtgtcgtccgcttctaccaagggacccagcgtgttccctctggctccttccagcaagtctacctctggcggaacagctgctctgggctgcctggtcaaggactactttcctgagcctgtgaccgtgtcttggaactctggcgctctgacatccggcgtgcacacatttccagctgtgctgcagtcctccggcctgtactctctgtcctctgtcgtgaccgtgccttccagctctctgggaacccagacctacatctgcaatgtgaaccacaagccttccaacaccaaggtggacaagagagtggaacccaagtcctgcgataagacccacacctgtcctccctgccctgcccctgaactgctgggcggacctagcgtgttcctgttccctccaaagcccaaggacaccctgatgatcagccggacccctgaagtgacctgcgtggtggtggatgtgtcccacgaggatcccgaagtgaagttcaattggtacgtggacggcgtggaagtgcacaacgccaagaccaagcccagagaggaacagtacaacagcacctaccgggtggtgtccgtgctgaccgtgctgcaccaggactggctgaacggcaaagagtacaagtgcaaggtgtccaacaaggccctgccagcccctatcgagaaaaccatcagcaaggccaagggccagcctagagagcctcaggtctgcaccctgcctcccagccgggaagagatgaccaagaaccaggtgtccctgagctgcgccgtgaagggcttctacccctccgatatcgccgtggaatgggagagcaacggccagcccgagaacaactacaagaccacccctcccgtgctggacagcgacggcagcttcttcctggtgtccaaactgaccgtggacaagagccggtggcagcagggcaatgtgttcagctgtagcgtgatgcacgaggccctgcacaaccactacacccagaagtctctgagcctgagccctggcaaa

SEQ ID NO: 288 - DNA, 1407 bp, Artificial Sequence
  source: /note="Description of Artificial Sequence: Synthetic polynucleotide"
atggaaaccgacacactgctgctgtgggtgctgctcttgtgggtgccaggatctacaggagaggtgcagctcgtggaatccggaggtggactggtgcagccggggggtagcctgcggctgtcctgtgcagcttccgggttcaccttctccaacgacgaaatgaactggatccgccaggccccgggcaagggactcgaatgggtgtcctacatctcctcccgctcctccactatctactatgccgatgccgtcaagggccgcttcaccatttctcgcgacaacgcccggaactccctgtacctccagatgaactccctgcgcgccgaggacactgccgtctactactgcgcgaggtcgtccgacggatccacctccttcgactactgggggcaaggaactctcgtgaccgtgtcctccgcttctaccaagggacccagcgtgttccctctggctccttccagcaagtctacctctggcggaacagctgctctgggctgcctggtcaaggactactttcctgagcctgtgaccgtgtcttggaactctggcgctctgacatccggcgtgcacacatttccagctgtgctgcagtcctccggcctgtactctctgtcctctgtcgtgaccgtgccttccagctctctgggaacccagacctacatctgcaatgtgaaccacaagccttccaacaccaaggtggacaagagagtggaacccaagtcctgcgataagacccacacctgtcctccctgccctgcccctgaactgctgggcggacctagcgtgttcctgttccctccaaagcccaaggacaccctgatgatcagccggacccctgaagtgacctgcgtggtggtggatgtgtcccacgaggatcccgaagtgaagttcaattggtacgtggacggcgtggaagtgcacaacgccaagaccaagcccagagaggaacagtacaacagcacctaccgggtggtgtccgtgctgaccgtgctgcaccaggactggctgaacggcaaagagtacaagtgcaaggtgtccaacaaggccctgccagcccctatcgagaaaaccatcagcaaggccaagggccagcctagagagcctcaggtctgcaccctgcctcccagccgggaagagatgaccaagaaccaggtgtccctgagctgcgccgtgaagggcttctacccctccgatatcgccgtggaatgggagagcaacggccagcccgagaacaactacaagaccacccctcccgtgctggacagcgacggcagcttcttcctggtgtccaaactgaccgtggacaagagccggtggcagcagggcaatgtgttcagctgtagcgtgatgcacgaggccctgcacaaccactacacccagaagtctctgagcctgagccctggcaaa

SEQ ID NO: 289 - DNA, 1407 bp, Artificial Sequence
  source: /note="Description of Artificial Sequence: Synthetic polynucleotide"
atggaaaccgacacactgctgctgtgggtgctgctcttgtgggtgccaggatctacaggagaagtgcaacttgtcgaaagtggtgggggcctggtgcagcctgggggctccctgcggctgtcctgcgccgcctccggattcactttctccaacgacgagatgaactggattagacaggctcctggaaagggtctcgaatgggtgtcctacattagctcatcttccagcaccatctactacgccgacgcagtgaccggaaggttcaccatctcgagggacaacgcccgcaactccctctacctgcagatgaactcgctgcgcgcggaggacaccgctgtgtactactgcgcccgcggcgtggacggagacttctccttcgactactggggacagggaactcttgtgaccgtgagcagcgcttctaccaagggacccagcgtgttccctctggctccttccagcaagtctacctctggcggaacagctgctctgggctgcctggtcaaggactactttcctgagcctgtgaccgtgtcttggaactctggcgctctgacatccggcgtgcacacatttccagctgtgctgcagtcctccggcctgtactctctgtcctctgtcgtgaccgtgccttccagctctctgggaacccagacctacatctgcaatgtgaaccacaagccttccaacaccaaggtggacaagagagtggaacccaagtcctgcgataagacccacacctgtcctccctgccctgcccctgaactgctgggcggacctagcgtgttcctgttccctccaaagcccaaggacaccctgatgatcagccggacccctgaagtgacctgcgtggtggtggatgtgtcccacgaggatcccgaagtgaagttcaattggtacgtggacggcgtggaagtgcacaacgccaagaccaagcccagagaggaacagtacaacagcacctaccgggtggtgtccgtgctgaccgtgctgcaccaggactggctgaacggcaaagagtacaagtgcaaggtgtccaacaaggccctgccagcccctatcgagaaaaccatcagcaaggccaagggccagcctagagagcctcaggtctgcaccctgcctcccagccgggaagagatgaccaagaaccaggtgtccctgagctgcgccgtgaagggcttctacccctccgatatcgccgtggaatgggagagcaacggccagcccgagaacaactacaagaccacccctcccgtgctggacagcgacggcagcttcttcctggtgtccaaactgaccgtggacaagagccggtggcagcagggcaatgtgttcagctgtagcgtgatgcacgaggccctgcacaaccactacacccagaagtctctgagcctgagccctggcaaa

SEQ ID NO: 290 - DNA, 1407 bp, Artificial Sequence
  source: /note="Description of Artificial Sequence: Synthetic polynucleotide"
atggaaaccgacacactgctgctgtgggtgctgctcttgtgggtgccaggatctacaggagaagtgcaactggtggaatcgggaggcggcctggtgcaacctggcggtagcctgcggctgagctgcgccgcctcaggcttcaccttttccaacgacgaaatgaactggatcagacaggcgcctggcaaaggactggagtgggtgtcctacatctcgtccaggtcaagcaccatttattacgcggacgccgtgaaagggagattcaccatcagcagagacaacgcccggaactccctctacctgcagatgaactccctgagggccgaggacaccgcagtgtactactgtgccagaaactccgactccgatggaagcttcgacatctggggacaggggaccctggtgactgtgtcgtccgcttctaccaagggacccagcgtgttccctctggctccttccagcaagtctacctctggcggaacagctgctctgggctgcctggtcaaggactactttcctgagcctgtgaccgtgtcttggaactctggcgctctgacatccggcgtgcacacatttccagctgtgctgcagtcctccggcctgtactctctgtcctctgtcgtgaccgtgccttccagctctctgggaacccagacctacatctgcaatgtgaaccacaagccttccaacaccaaggtggacaagagagtggaacccaagtcctgcgataagacccacacctgtcctccctgccctgcccctgaactgctgggcggacctagcgtgttcctgttccctccaaagcccaaggacaccctgatgatcagccggacccctgaagtgacctgcgtggtggtggatgtgtcccacgaggatcccgaagtgaagttcaattggtacgtggacggcgtggaagtgcacaacgccaagaccaagcccagagaggaacagtacaacagcacctaccgggtggtgtccgtgctgaccgtgctgcaccaggactggctgaacggcaaagagtacaagtgcaaggtgtccaacaaggccctgccagcccctatcgagaaaaccatcagcaaggccaagggccagcctagagagcctcaggtctgcaccctgcctcccagccgggaagagatgaccaagaaccaggtgtccctgagctgcgccgtgaagggcttctacccctccgatatcgccgtggaatgggagagcaacggccagcccgagaacaactacaagaccacccctcccgtgctggacagcgacggcagcttcttcctggtgtccaaactgaccgtggacaagagccggtggcagcagggcaatgtgttcagctgtagcgtgatgcacgaggccctgcacaaccactacacccagaagtctctgagcctgagccctggcaaa

SEQ ID NO: 291 - DNA, 1407 bp, Artificial Sequence
  source: /note="Description of Artificial Sequence: Synthetic polynucleotide"
atggaaaccgacacactgctgctgtgggtgctgctcttgtgggtgccaggatctacaggagaagtgcagctggtcgaatcggggggaggactggtccagcctggagggtccctccgcctgagctgcgccgcctccggattcaccttttccaacgacgagatgaactggatcaggcaggccccgggcaaggggctggaatgggtgtcatacatctccagccgctcatcgacaatttactacgccgatgccgtgaagggtagatttaccatctcccgggacaatgcccgaaacagcctgtatctgcaaatgaactccctgcgggcggaggataccgctgtctactactgtgccagaggcgtggatggggacttcagctttgacttttggggacagggcaccctcgtcaccgtgagcagcgcttctaccaagggacccagcgtgttccctctggctccttccagcaagtctacctctggcggaacagctgctctgggctgcctggtcaaggactactttcctgagcctgtgaccgtgtcttggaactctggcgctctgacatccggcgtgcacacatttccagctgtgctgcagtcctccggcctgtactctctgtcctctgtcgtgaccgtgccttccagctctctgggaacccagacctacatctgcaatgtgaaccacaagccttccaacaccaaggtggacaagagagtggaacccaagtcctgcgataagacccacacctgtcctccctgccctgcccctgaactgctgggcggacctagcgtgttcctgttccctccaaagcccaaggacaccctgatgatcagccggacccctgaagtgacctgcgtggtggtggatgtgtcccacgaggatcccgaagtgaagttcaattggtacgtggacggcgtggaagtgcacaacgccaagaccaagcccagagaggaacagtacaacagcacctaccgggtggtgtccgtgctgaccgtgctgcaccaggactggctgaacggcaaagagtacaagtgcaaggtgtccaacaaggccctgccagcccctatcgagaaaaccatcagcaaggccaagggccagcctagagagcctcaggtctgcaccctgcctcccagccgggaagagatgaccaagaaccaggtgtccctgagctgcgccgtgaagggcttctacccctccgatatcgccgtggaatgggagagcaacggccagcccgagaacaactacaagaccacccctcccgtgctggacagcgacggcagcttcttcctggtgtccaaactgaccgtggacaagagccggtggcagcagggcaatgtgttcagctgtagcgtgatgcacgaggccctgcacaaccactacacccagaagtctctgagcctgagccctggcaaa

SEQ ID NO: 292 - DNA, 1407 bp, Artificial Sequence
  source: /note="Description of Artificial Sequence: Synthetic polynucleotide"
atggaaaccgacacactgctgctgtgggtgctgctcttgtgggtgccaggatctacaggagaggtgcagctggtggagtccggaggcggccttgtccagccgggcgggtctctgcggctgtcatgtgcggcctcgggattcactttttccaacgacgaaatgaactggatccgccaggcccctgggaaggggcttgaatgggtgagctacatctcctcacggtcctccactatctattacgccgacgctgtgaagggccgcttcactatctcacgcgacaatgccaggaactctctctacctgcagatgaactccctgcgggccgaagataccgcggtgtactactgtgcccgctcgggccggctggacgggtcattcgactactggggacaagggaccctggtcaccgtctcctctgcttctaccaagggacccagcgtgttccctctggctccttccagcaagtctacctctggcggaacagctgctctgggctgcctggtcaaggactactttcctgagcctgtgaccgtgtcttggaactctggcgctctgacatccggcgtgcacacatttccagctgtgctgcagtcctccggcctgtactctctgtcctctgtcgtgaccgtgccttccagctctctgggaacccagacctacatctgcaatgtgaaccacaagccttccaacaccaaggtggacaagagagtggaacccaagtcctgcgataagacccacacctgtcctccctgccctgcccctgaactgctgggcggacctagcgtgttcctgttccctccaaagcccaaggacaccctgatgatcagccggacccctgaagtgacctgcgtggtggtggatgtgtcccacgaggatcccgaagtgaagttcaattggtacgtggacggcgtggaagtgcacaacgccaagaccaagcccagagaggaacagtacaacagcacctaccgggtggtgtccgtgctgaccgtgctgcaccaggactggctgaacggcaaagagtacaagtgcaaggtgtccaacaaggccctgccagcccctatcgagaaaaccatcagcaaggccaagggccagcctagagagcctcaggtctgcaccctgcctcccagccgggaagagatgaccaagaaccaggtgtccctgagctgcgccgtgaagggcttctacccctccgatatcgccgtggaatgggagagcaacggccagcccgagaacaactacaagaccacccctcccgtgctggacagcgacggcagcttcttcctggtgtccaaactgaccgtggacaagagccggtggcagcagggcaatgtgttcagctgtagcgtgatgcacgaggccctgcacaaccactacacccagaagtctctgagcctgagccctggcaaa

SEQ ID NO: 293 - DNA, 1407 bp, Artificial Sequence
  source: /note="Description of Artificial Sequence: Synthetic polynucleotide"
atggaaaccgacacactgctgctgtgggtgctgctcttgtgggtgccaggatctacaggagaagtccagctggtcgagtccggcggtgggctggtccagcccggcggatcgctgcgcctgtcctgtgccgcctccggcttcaccttctccaacgacgagatgaactggatcagacaggcccccggtaagggactggagtgggtgagctacatctcctcgcgcagctccaccatctactacgccgacgccgtgaagggaaggttcaccatcagcagagataacgcgcggaacagcctgtacctgcagatgaactcactgcgggctgaagacacagccgtctattactgtgccagaggagtggaatccgatttcagcttcgactactggggacaaggaactctggtcacggtcagctccgcttctaccaagggacccagcgtgttccctctggctccttccagcaagtctacctctggcggaacagctgctctgggctgcctggtcaaggactactttcctgagcctgtgaccgtgtcttggaactctggcgctctgacatccggcgtgcacacatttccagctgtgctgcagtcctccggcctgtactctctgtcctctgtcgtgaccgtgccttccagctctctgggaacccagacctacatctgcaatgtgaaccacaagccttccaacaccaaggtggacaagagagtggaacccaagtcctgcgataagacccacacctgtcctccctgccctgcccctgaactgctgggcggacctagcgtgttcctgttccctccaaagcccaaggacaccctgatgatcagccggacccctgaagtgacctgcgtggtggtggatgtgtcccacgaggatcccgaagtgaagttcaattggtacgtggacggcgtggaagtgcacaacgccaagaccaagcccagagaggaacagtacaacagcacctaccgggtggtgtccgtgctgaccgtgctgcaccaggactggctgaacggcaaagagtacaagtgcaaggtgtccaacaaggccctgccagcccctatcgagaaaaccatcagcaaggccaagggccagcctagagagcctcaggtctgcaccctgcctcccagccgggaagagatgaccaagaaccaggtgtccctgagctgcgccgtgaagggcttctacccctccgatatcgccgtggaatgggagagcaacggccagcccgagaacaactacaagaccacccctcccgtgctggacagcgacggcagcttcttcctggtgtccaaactgaccgtggacaagagccggtggcagcagggcaatgtgttcagctgtagcgtgatgcacgaggccctgcacaaccactacacccagaagtctctgagcctgagccctggcaaa

SEQ ID NO: 294 - DNA, 1410 bp, Artificial Sequence
  source: /note="Description of Artificial Sequence: Synthetic polynucleotide"
atggaaaccgacacactgctgctgtgggtgctgctcttgtgggtgccaggatctacaggacaggtgcagcttgtgcaaagcgggggaggcgtggtgcagccgggacggagcctgcggctgtcgtgcgccgcgagcggtttcaccttctcctcctacgctatgcactgggtccgccaggcgccgggcaagggcctcgaatgggtggccgtgatcagctacgatggctccaacaagtactacgccgactcagtgaagggaaggttcaccatctcaagagataacagcaagaacacgctgtacctccagatgaactccctccgggccgaagacacagccgtctactactgtgcgagagagctcgattacggcgattacggcctggacgtgtggggcaagggaaccacggtgaccgtctcctccgcttctaccaagggacccagcgtgttccctctggctccttccagcaagtctacctctggcggaacagctgctctgggctgcctggtcaaggactactttcctgagcctgtgaccgtgtcttggaactctggcgctctgacatccggcgtgcacacatttccagctgtgctgcagtcctccggcctgtactctctgtcctctgtcgtgaccgtgccttccagctctctgggaacccagacctacatctgcaatgtgaaccacaagccttccaacaccaaggtggacaagagagtggaacccaagtcctgcgataagacccacacctgtcctccctgccctgcccctgaactgctgggcggacctagcgtgttcctgttccctccaaagcccaaggacaccctgatgatcagccggacccctgaagtgacctgcgtggtggtggatgtgtcccacgaggatcccgaagtgaagttcaattggtacgtggacggcgtggaagtgcacaacgccaagaccaagcccagagaggaacagtacaacagcacctaccgggtggtgtccgtgctgaccgtgctgcaccaggactggctgaacggcaaagagtacaagtgcaaggtgtccaacaaggccctgccagcccctatcgagaaaaccatcagcaaggccaagggccagcctagagagcctcaggtctgcaccctgcctcccagccgggaagagatgaccaagaaccaggtgtccctgagctgcgccgtgaagggcttctacccctccgatatcgccgtggaatgggagagcaacggccagcccgagaacaactacaagaccacccctcccgtgctggacagcgacggcagcttcttcctggtgtccaaactgaccgtggacaagagccggtggcagcagggcaatgtgttcagctgtagcgtgatgcacgaggccctgcacaaccactacacccagaagtctctgagcctgagccctggcaaa

SEQ ID NO: 295 - DNA, 1410 bp, Artificial Sequence
  source: /note="Description of Artificial Sequence: Synthetic polynucleotide"
atggaaaccgacacactgctgctgtgggtgctgctcttgtgggtgccaggatctacaggacaagtgcagctcgtgcagtcaggcggtggcgtggtgcagcccggccggtctctgaggctcagctgcgccgcctcgggcttcaccttctcgtcatacgccatgcactgggtgcgccaggcccccgggaagggactggaatgggtcgccgtgatctcctacgatggatcgaacaagtactacgccgactccgtgaaggggcggttcaccatctcccgcgacaactccaagaacaccctttatctgcaaatgaactcgctcagagcagaggacaccgctgtgtactactgcgccagagagctggactacggtgattggggactggacgtgtggggcaagggtaccaccgtgactgtgtcgtccgcttctaccaagggacccagcgtgttccctctggctccttccagcaagtctacctctggcggaacagctgctctgggctgcctggtcaaggactactttcctgagcctgtgaccgtgtcttggaactctggcgctctgacatccggcgtgcacacatttccagctgtgctgcagtcctccggcctgtactctctgtcctctgtcgtgaccgtgccttccagctctctgggaacccagacctacatctgcaatgtgaaccacaagccttccaacaccaaggtggacaagagagtggaacccaagtcctgcgataagacccacacctgtcctccctgccctgcccctgaactgctgggcggacctagcgtgttcctgttccctccaaagcccaaggacaccctgatgatcagccggacccctgaagtgacctgcgtggtggtggatgtgtcccacgaggatcccgaagtgaagttcaattggtacgtggacggcgtggaagtgcacaacgccaagaccaagcccagagaggaacagtacaacagcacctaccgggtggtgtccgtgctgaccgtgctgcaccaggactggctgaacggcaaagagtacaagtgcaaggtgtccaacaaggccctgccagcccctatcgagaaaaccatcagcaaggccaagggccagcctagagagcctcaggtctgcaccctgcctcccagccgggaagagatgaccaagaaccaggtgtccctgagctgcgccgtgaagggcttctacccctccgatatcgccgtggaatgggagagcaacggccagcccgagaacaactacaagaccacccctcccgtgctggacagcgacggcagcttcttcctggtgtccaaactgaccgtggacaagagccggtggcagcagggcaatgtgttcagctgtagcgtgatgcacgaggccctgcacaaccactacacccagaagtctctgagcctgagccctggcaaa

SEQ ID NO: 296 - DNA, 1410 bp, Artificial Sequence
  source: /note="Description of Artificial Sequence: Synthetic polynucleotide"
atggaaaccgacacactgctgctgtgggtgctgctcttgtgggtgccaggatctacaggacaagtgcaactggtgcaatccggagggggtgtggtccaaccgggacgcagcctgcggctgtcctgcgccgccagcggcttcacattctcctcctacgccatgcactgggtccgccaggcgccaggtaagggactcgaatgggtggcagtgatcccttactacggatcaaacaagtattacgccgattccgtgaagggccgcttcaccatcagcagagacaactccaagaacaccctctacctgcagatgaactcccttcgcgccgaggataccgccgtctactactgcgcccgcgagctggactacggtgactacggactcgatgtgtggggaaagggtaccactgtgaccgtgagctccgcttctaccaagggacccagcgtgttccctctggctccttccagcaagtctacctctggcggaacagctgctctgggctgcctggtcaaggactactttcctgagcctgtgaccgtgtcttggaactctggcgctctgacatccggcgtgcacacatttccagctgtgctgcagtcctccggcctgtactctctgtcctctgtcgtgaccgtgccttccagctctctgggaacccagacctacatctgcaatgtgaaccacaagccttccaacaccaaggtggacaagagagtggaacccaagtcctgcgataagacccacacctgtcctccctgccctgcccctgaactgctgggcggacctagcgtgttcctgttccctccaaagcccaaggacaccctgatgatcagccggacccctgaagtgacctgcgtggtggtggatgtgtcccacgaggatcccgaagtgaagttcaattggtacgtggacggcgtggaagtgcacaacgccaagaccaagcccagagaggaacagtacaacagcacctaccgggtggtgtccgtgctgaccgtgctgcaccaggactggctgaacggcaaagagtacaagtgcaaggtgtccaacaaggccctgccagcccctatcgagaaaaccatcagcaaggccaagggccagcctagagagcctcaggtctgcaccctgcctcccagccgggaagagatgaccaagaaccaggtgtccctgagctgcgccgtgaagggcttctacccctccgatatcgccgtggaatgggagagcaacggccagcccgagaacaactacaagaccacccctcccgtgctggacagcgacggcagcttcttcctggtgtccaaactgaccgtggacaagagccggtggcagcagggcaatgtgttcagctgtagcgtgatgcacgaggccctgcacaaccactacacccagaagtctctgagcctgagccctggcaaa

SEQ ID NO: 297 - DNA, 1410 bp, Artificial Sequence
  source: /note="Description of Artificial Sequence: Synthetic polynucleotide"
atggaaaccgacacactgctgctgtgggtgctgctcttgtgggtgccaggatctacaggacaggtgcaactggtccagtcgggcggaggagtggtccagccgggtaggtcactgcggctgtcatgtgccgctagcggattcactttctcttcctacgcaatgcactgggtgagacaagcccctggcaagggactggagtgggtcgccgtgatctcgtatgacgggtccgataagtactacgctgattccgtgaagggacgcttcacgatcagccgcgacaactccaaaaacactctctacctgcaaatgaattcccttcgcgccgaagatactgcagtgtactactgcgccagagagctggactacggagactacggcctggacgtgtggggcaagggcaccactgtgaccgtctcctccgcttctaccaagggacccagcgtgttccctctggctccttccagcaagtctacctctggcggaacagctgctctgggctgcctggtcaaggactactttcctgagcctgtgaccgtgtcttggaactctggcgctctgacatccggcgtgcacacatttccagctgtgctgcagtcctccggcctgtactctctgtcctctgtcgtgaccgtgccttccagctctctgggaacccagacctacatctgcaatgtgaaccacaagccttccaacaccaaggtggacaagagagtggaacccaagtcctgcgataagacccacacctgtcctccctgccctgcccctgaactgctgggcggacctagcgtgttcctgttccctccaaagcccaaggacaccctgatgatcagccggacccctgaagtgacctgcgtggtggtggatgtgtcccacgaggatcccgaagtgaagttcaattggtacgtggacggcgtggaagtgcacaacgccaagaccaagcccagagaggaacagtacaacagcacctaccgggtggtgtccgtgctgaccgtgctgcaccaggactggctgaacggcaaagagtacaagtgcaaggtgtccaacaaggccctgccagcccctatcgagaaaaccatcagcaaggccaagggccagcctagagagcctcaggtctgcaccctgcctcccagccgggaagagatgaccaagaaccaggtgtccctgagctgcgccgtgaagggcttctacccctccgatatcgccgtggaatgggagagcaacggccagcccgagaacaactacaagaccacccctcccgtgctggacagcgacggcagcttcttcctggtgtccaaactgaccgtggacaagagccggtggcagcagggcaatgtgttcagctgtagcgtgatgcacgaggccctgcacaaccactacacccagaagtctctgagcctgagccctggcaaa

SEQ ID NO: 298 - DNA, 711 bp, Artificial Sequence
  source: /note="Description of Artificial Sequence: Synthetic polynucleotide"
atggaaaccgacacactgctgctgtgggtgctgctcttgtgggtgccaggatctacaggacaactggtgctgacccagcccccttccgtctccggcgccccgggccagcgcgtcactatctcctgtaccggcagctccagcaacatcggagcaggatacgacgtgcactggtaccaacagctccccggaaccgcgcctaagctgctgatctacgggaactctaaccggccgtccggcgtgcctgaccgcttcagcggatcgaagtccggcaccagcgcctccctggccatcactggactgcaggccgaggacgaagccgattactactgccagtcctacgactcctccctgtccgaggaagtgttcggaggcgggacgaagctcaccgtcctgggacaacctaaggccaatcctaccgtgacactgttccctccatcctccgaggaactgcaggccaacaaggctaccctcgtgtgcctgatctccgacttttaccctggcgctgtgaccgtggcctggaaggctgatggatctcctgtgaaggctggcgtggaaaccaccaagccttccaagcagtccaacaacaaatacgccgcctcctcctacctgtctctgacccctgaacagtggaagtcccaccggtcctacagctgccaagtgacccatgagggctccaccgtggaaaagaccgtggctcctaccgagtgctcc

SEQ ID NO: 299 - DNA, 702 bp, Artificial Sequence
  source: /note="Description of Artificial Sequence: Synthetic polynucleotide"
atggaaaccgacacactgctgctgtgggtgctgctcttgtgggtgccaggatctacaggatccctcgtgctgacccaacctccttcagtctccgtggcccccggcaagaccgcccgcatcacctgtggcggtaacaacatcggctccaagtcagtccactggtaccagcagaagccgggccaagctcccgtgctggtcgtgtacgacgactcagaccgccccagcggtatccctgagagatttagcggatccaactccgggaacaccgctaccctgaccatctcaagggtggaggccggagacgaagccgactactactgccaggtgtgggattccagctccgaccacgtggtgttcggcggcggcactcagctcaccgtgctgggacaacctaaggccaatcctaccgtgacactgttccctccatcctccgaggaactgcaggccaacaaggctaccctcgtgtgcctgatctccgacttttaccctggcgctgtgaccgtggcctggaaggctgatggatctcctgtgaaggctggcgtggaaaccaccaagccttccaagcagtccaacaacaaatacgccgcctcctcctacctgtctctgacccctgaacagtggaagtcccaccggtcctacagctgccaagtgacccatgagggctccaccgtggaaaagaccgtggctcctaccgagtgctcc

SEQ ID NO: 300 - DNA, 1401 bp, Artificial Sequence
  source: /note="Description of Artificial Sequence: Synthetic polynucleotide"
atggaaaccgacacactgctgctgtgggtgctgctcttgtgggtgccaggatctacaggagaagtgcagctggtggaaagcggtggcggtctggtgcagcctggcggttccctccggctgtcatgtgctgcctccggattctcgttcaacgcgtatgccatgaactgggtgaggcaggccccgggaaagggactggaatgggtggggagaatccggaccaagaacaataactacgctacttactacgccgactccgtcaaggaccggttcacaatttcccgggacgacagcaagagctcactgtaccttcagatgaacagcctcaaaaccgaggacaccgccgtgtactactgtgccaccttttacggcaacggtgtgtggggacagggaacaactgtcaccgtgtcctccgcttctaccaagggacccagcgtgttccctctggctccttccagcaagtctacctctggcggaacagctgctctgggctgcctggtcaaggactactttcctgagcctgtgaccgtgtcttggaactctggcgctctgacatccggcgtgcacacatttccagctgtgctgcagtcctccggcctgtactctctgtcctctgtcgtgaccgtgccttccagctctctgggaacccagacctacatctgcaatgtgaaccacaagccttccaacaccaaggtggacaagagagtggaacccaagtcctgcgataagacccacacatgtcctccatgccctgcccctgagctgctgggcggaccttccgtgttcctgttccctccaaagcccaaggacaccctgatgatcagccggacccctgaagtgacctgcgtggtggtggatgtgtcccacgaggatcccgaagtgaagttcaattggtacgtggacggcgtggaagtgcacaacgccaagaccaagcccagagaggaacagtacaacagcacctaccgggtggtgtccgtgctgaccgtgctgcatcaggactggctgaacggcaaagagtacaagtgcaaggtgtccaacaaggccctgcctgcccctatcgagaaaaccatcagcaaggccaagggccagccccgcgaacctcaggtgtacacactgcctccctgccgggaagagatgaccaagaaccaggtgtccctgtggtgcctggtcaagggcttctacccctccgatatcgccgtggaatgggagagcaacggccagcccgagaacaactacaagaccacccctcccgtgctggacagcgacggcagcttcttcctgtactccaaactgaccgtggacaagagccggtggcagcagggcaatgtgttcagctgtagcgtgatgcacgaggccctgcacaaccactacacccagaagtccctgagcctgtctcctggcaaa

SEQ ID NO: 301 - DNA, 1401 bp, Artificial Sequence
  source: /note="Description of Artificial Sequence: Synthetic polynucleotide"
atggaaaccgacacactgctgctgtgggtgctgctcttgtgggtgccaggatctacaggagaggtgcagctggttgaatctggcggaggattggttcagcctggcggctctctgagactgtcttgtgccgcctctggcttctccttcaacgcctacgccatgaactgggtccgacaggctcctggcaaaggcctggaatgggtcggaagaatccggaccaagaacaacaactacgccacctactacgccgactccgtgaaggaccggttcaccatctctcgggacgactccaagtccagcctgtacctgcagatgaactccctgaaaaccgaggacaccgccgtgtactactgcgccaccttttacggcaatggcgtgtggggccagggcaccacagttacagtttcttccgcttctaccaagggacccagcgtgttccctctggctccttccagcaagtctacctctggcggaacagctgctctgggctgcctggtcaaggactactttcctgagcctgtgaccgtgtcttggaactctggcgctctgacatccggcgtgcacacatttccagctgtgctgcagtcctccggcctgtactctctgtcctctgtcgtgaccgtgccttccagctctctgggaacccagacctacatctgcaatgtgaaccacaagccttccaacaccaaggtggacaagagagtggaacccaagtcctgcgataagacccacacatgtcctccatgccctgcccctgagctgctgggcggaccttccgtgttcctgttccctccaaagcccaaggacaccctgatgatcagccggacccctgaagtgacctgcgtggtggtggatgtgtcccacgaggatcccgaagtgaagttcaattggtacgtggacggcgtggaagtgcacaacgccaagaccaagcccagagaggaacagtacaacagcacctaccgggtggtgtccgtgctgaccgtgctgcatcaggactggctgaacggcaaagagtacaagtgcaaggtgtccaacaaggccctgcctgcccctatcgagaaaaccatcagcaaggccaagggccagccccgcgaacctcaggtgtacacactgcctccctgccgggaagagatgaccaagaaccaggtgtccctgtggtgcctggtcaagggcttctacccctccgatatcgccgtggaatgggagagcaacggccagcccgagaacaactacaagaccacccctcccgtgctggacagcgacggcagcttcttcctgtactccaaactgaccgtggacaagagccggtggcagcagggcaatgtgttcagctgtagcgtgatgcacgaggccctgcacaaccactacacccagaagtccctgagcctgtctcctggcaaa

SEQ ID NO: 302 - DNA, 717 bp, Artificial Sequence
  source: /note="Description of Artificial Sequence: Synthetic polynucleotide"
atggaaaccgacacactgctgctgtgggtgctgctcttgtgggtgccaggatctacaggagacgtcgtcatgacccaatccccgctctccctgccggtgactctcggccagccggcgtccatctcgtgcaagtcctcccaatccctgctggattcggatgggaagactttcctgaactggctgcagcaacggcccggccagtcgccacggcggctgatctacctggtgtccaagctggattcaggtgtgcctgatagattctccggcagcggatcggggaccgacttcacgctgaagatctccagagtggaagcagaggacgtgggcgtctattactgttggcaggggactcatttcccctatacctttggaggtggtactaaggtggaaattaagagaacagtggccgctccttccgtgttcatcttcccaccctccgacgagcagctgaagtccggcaccgcttctgtcgtgtgcctgctcaacaacttctaccctcgggaagccaaggtgcagtggaaggtggacaacgccctgcagtccggcaactcccaggaatccgtcaccgagcaggactccaaggacagcacctactccctgtcctccaccctgaccctgtccaaggccgactacgagaagcacaaggtgtacgcctgcgaagtgacccaccagggcctgagcagccccgtgaccaagtccttcaaccggggcgagtgc

SEQ ID NO: 303 - DNA, 2175 bp, Artificial Sequence
  source: /note="Description of Artificial Sequence: Synthetic polynucleotide"
atggaaaccgacacactgctgctgtgggtgctgctcttgtgggtgccaggatctacaggagaagtgcagctggtcgaaagcggagggggtctggtccagcctggagggtccctgcggctgtcctgcgccgcttccggcttcaccttctccaacgatgaaatgaactggatccgccaagcccctggaaagggcctggaatgggtgtcgtacatctcgagcaggtccagcactatctactatgccgacgcggtgaagggacgcttcactatcagccgcgataacgcacgcaattccctctacctgcagatgaactcgctcagagctgaggatactgccgtctactactgcgcccgcggcgtggacggcgatttttccttcgattactggggacagggcactcttgtcaccgtgtcaagcgcttctaccaagggacccagcgtgttccctctggctccttccagcaagtctacctctggcggaacagctgctctgggctgcctggtcaaggactactttcctgagcctgtgaccgtgtcttggaactctggcgctctgacatccggcgtgcacacatttccagctgtgctgcagtcctccggcctgtactctctgtcctctgtcgtgaccgtgccttccagctctctgggaacccagacctacatctgcaatgtgaaccacaagccttccaacaccaaggtggacaagagagtggaacccaagtcctgcgataagacccacacctgtcctccctgccctgcccctgaactgctgggcggacctagcgtgttcctgttccctccaaagcccaaggacaccctgatgatcagccggacccctgaagtgacctgcgtggtggtggatgtgtcccacgaggatcccgaagtgaagttcaattggtacgtggacggcgtggaagtgcacaacgccaagaccaagcccagagaggaacagtacaacagcacctaccgggtggtgtccgtgctgaccgtgctgcaccaggactggctgaacggcaaagagtacaagtgcaaggtgtccaacaaggccctgccagcccctatcgagaaaaccatcagcaaggccaagggccagcctagagagcctcaggtctgcaccctgcctcccagccgggaagagatgaccaagaaccaggtgtccctgagctgcgccgtgaagggcttctacccctccgatatcgccgtggaatgggagagcaacggccagcccgagaacaactacaagaccacccctcccgtgctggacagcgacggcagcttcttcctggtgtccaaactgaccgtggacaagagccggtggcagcagggcaatgtgttcagctgtagcgtgatgcacgaggccctgcacaaccactacacccagaagtctctgagcctgagccctggcaaaggtggcggaggaagcggaggcggaggttctggcggcggaggatctcaggtgcagctggttcagtctggcgccgaagtgaagaaacctggctcctccgtgaaggtgtcctgcaaggcttctggcggcaccttctcctcttacgccatctcctgggtccgacaggctcctggacaaggcttggaatggatgggcggcatcatccccatcttcggcaccgccaattacgcccagaaattccagggcagagtgaccatcaccgccgacaagtctacctccaccgcctacatggaactgtccagcctgagatctgaggacaccgccgtgtactactgtgccagaggcggctactcttacggctccctggattattggggccagggcacactggtcaccgtgtcctctggtggcggaggaagcggaggcggaggttctggcggcggaggatctgacatccagatgacccagtctccatcctctctgtccgcctctgtgggcgacagagtgaccatcacctgtcgggcctctcagtccatcatctccgacctgaactggtatcagcagaagcccggcaaggcccctaagctgctgatccatgctgcttccagtctgcagtctggcgtgccctctagattctccggctctggctctggcaccgactttaccctgacaatctccagcctgcagcctgaggacttcgccacctactactgccagcagtcctacagcaccccttacacctttggccagggcaccaagctggaaatcaag

SEQ ID NO: 304 - DNA, 2178 bp, Artificial Sequence
  source: /note="Description of Artificial Sequence: Synthetic polynucleotide"
atggaaaccgacacactgctgctgtgggtgctgctcttgtgggtgccaggatctacaggacaggtgcagcttgtgcaaagcgggggaggcgtggtgcagccgggacggagcctgcggctgtcgtgcgccgcgagcggtttcaccttctcctcctacgctatgcactgggtccgccaggcgccgggcaagggcctcgaatgggtggccgtgatcagctacgatggctccaacaagtactacgccgactcagtgaagggaaggttcaccatctcaagagataacagcaagaacacgctgtacctccagatgaactccctccgggccgaagacacagccgtctactactgtgcgagagagctcgattacggcgattacggcctggacgtgtggggcaagggaaccacggtgaccgtctcctccgcttctaccaagggacccagcgtgttccctctggctccttccagcaagtctacctctggcggaacagctgctctgggctgcctggtcaaggactactttcctgagcctgtgaccgtgtcttggaactctggcgctctgacatccggcgtgcacacatttccagctgtgctgcagtcctccggcctgtactctctgtcctctgtcgtgaccgtgccttccagctctctgggaacccagacctacatctgcaatgtgaaccacaagccttccaacaccaaggtggacaagagagtggaacccaagtcctgcgataagacccacacctgtcctccctgccctgcccctgaactgctgggcggacctagcgtgttcctgttccctccaaagcccaaggacaccctgatgatcagccggacccctgaagtgacctgcgtggtggtggatgtgtcccacgaggatcccgaagtgaagttcaattggtacgtggacggcgtggaagtgcacaacgccaagaccaagcccagagaggaacagtacaacagcacctaccgggtggtgtccgtgctgaccgtgctgcaccaggactggctgaacggcaaagagtacaagtgcaaggtgtccaacaaggccctgccagcccctatcgagaaaaccatcagcaaggccaagggccagcctagagagcctcaggtctgcaccctgcctcccagccgggaagagatgaccaagaaccaggtgtccctgagctgcgccgtgaagggcttctacccctccgatatcgccgtggaatgggagagcaacggccagcccgagaacaactacaagaccacccctcccgtgctggacagcgacggcagcttcttcctggtgtccaaactgaccgtggacaagagccggtggcagcagggcaatgtgttcagctgtagcgtgatgcacgaggccctgcacaaccactacacccagaagtctctgagcctgagccctggcaaaggtggcggaggaagcggaggcggaggttctggcggcggaggatctcaggtgcagctggttcagtctggcgccgaagtgaagaaacctggctcctccgtgaaggtgtcctgcaaggcttctggcggcaccttctcctcttacgccatctcctgggtccgacaggctcctggacaaggcttggaatggatgggcggcatcatccccatcttcggcaccgccaattacgcccagaaattccagggcagagtgaccatcaccgccgacaagtctacctccaccgcctacatggaactgtccagcctgagatctgaggacaccgccgtgtactactgtgccagaggcggctactcttacggctccctggattattggggccagggcacactggtcaccgtgtcctctggtggcggaggaagcggaggcggaggttctggcggcggaggatctgacatccagatgacccagtctccatcctctctgtccgcctctgtgggcgacagagtgaccatcacctgtcgggcctctcagtccatcatctccgacctgaactggtatcagcagaagcccggcaaggcccctaagctgctgatccatgctgcttccagtctgcagtctggcgtgccctctagattctccggctctggctctggcaccgactttaccctgacaatctccagcctgcagcctgaggacttcgccacctactactgccagcagtcctacagcaccccttacacctttggccagggcaccaagctggaaatcaag

SEQ ID NO: 305 - DNA, 2169 bp, Artificial Sequence
  source: /note="Description of Artificial Sequence: Synthetic polynucleotide"
atggaaaccgacacactgctgctgtgggtgctgctcttgtgggtgccaggatctacaggagaagtgcagctggtggaaagcggtggcggtctggtgcagcctggcggttccctccggctgtcatgtgctgcctccggattctcgttcaacgcgtatgccatgaactgggtgaggcaggccccgggaaagggactggaatgggtggggagaatccggaccaagaacaataactacgctacttactacgccgactccgtcaaggaccggttcacaatttcccgggacgacagcaagagctcactgtaccttcagatgaacagcctcaaaaccgaggacaccgccgtgtactactgtgccaccttttacggcaacggtgtgtggggacagggaacaactgtcaccgtgtcctccgcttctaccaagggacccagcgtgttccctctggctccttccagcaagtctacctctggcggaacagctgctctgggctgcctggtcaaggactactttcctgagcctgtgaccgtgtcttggaactctggcgctctgacatccggcgtgcacacatttccagctgtgctgcagtcctccggcctgtactctctgtcctctgtcgtgaccgtgccttccagctctctgggaacccagacctacatctgcaatgtgaaccacaagccttccaacaccaaggtggacaagagagtggaacccaagtcctgcgataagacccacacatgtcctccatgccctgcccctgagctgctgggcggaccttccgtgttcctgttccctccaaagcccaaggacaccctgatgatcagccggacccctgaagtgacctgcgtggtggtggatgtgtcccacgaggatcccgaagtgaagttcaattggtacgtggacggcgtggaagtgcacaacgccaagaccaagcccagagaggaacagtacaacagcacctaccgggtggtgtccgtgctgaccgtgctgcatcaggactggctgaacggcaaagagtacaagtgcaaggtgtccaacaaggccctgcctgcccctatcgagaaaaccatcagcaaggccaagggccagccccgcgaacctcaggtgtacacactgcctccctgccgggaagagatgaccaagaaccaggtgtccctgtggtgcctggtcaagggcttctacccctccgatatcgccgtggaatgggagagcaacggccagcccgagaacaactacaagaccacccctcccgtgctggacagcgacggcagcttcttcctgtactccaaactgaccgtggacaagagccggtggcagcagggcaatgtgttcagctgtagcgtgatgcacgaggccctgcacaaccactacacccagaagtccctgagcctgtctcctggcaaaggtggcggaggaagcggaggcggaggttctggcggcggaggatctcaggtgcagctggttcagtctggcgccgaagtgaagaaacctggctcctccgtgaaggtgtcctgcaaggcttctggcggcaccttctcctcttacgccatctcctgggtccgacaggctcctggacaaggcttggaatggatgggcggcatcatccccatcttcggcaccgccaattacgcccagaaattccagggcagagtgaccatcaccgccgacaagtctacctccaccgcctacatggaactgtccagcctgagatctgaggacaccgccgtgtactactgtgccagaggcggctactcttacggctccctggattattggggccagggcacactggtcaccgtgtcctctggtggcggaggaagcggaggcggaggttctggcggcggaggatctgacatccagatgacccagtctccatcctctctgtccgcctctgtgggcgacagagtgaccatcacctgtcgggcctctcagtccatcatctccgacctgaactggtatcagcagaagcccggcaaggcccctaagctgctgatccatgctgcttccagtctgcagtctggcgtgccctctagattctccggctctggctctggcaccgactttaccctgacaatctccagcctgcagcctgaggacttcgccacctactactgccagcagtcctacagcaccccttacacctttggccagggcaccaagctggaaatcaag

SEQ ID NO: 306 - DNA, 1155 bp, Artificial Sequence
  source: /note="Description of Artificial Sequence: Synthetic polynucleotide"
atggaaaccgacacactgctgctgtgggtgctgctcttgtgggtgccaggatctacaggacaactggtgctgacccagcccccttccgtctccggcgccccgggccagcgcgtcactatctcctgtaccggcagctccagcaacatcggagcaggatacgacgtgcactggtaccaacagctccccggaaccgcgcctaagctgctgatctacgggaactctaaccggccgtccggcgtgcctgaccgcttcagcggatcgaagtccggcaccagcgcctccctggccatcactggactgcaggccgaggacgaagccgattactactgccagtcctacgactcctccctgtccgaggaagtgttcggaggcgggacgaagctcaccgtcctgggacaacctaaggccaatcctaccgtgacactgttccctccatcctccgaggaactgcaggccaacaaggctaccctcgtgtgcctgatctccgacttttaccctggcgctgtgaccgtggcctggaaggctgatggatctcctgtgaaggctggcgtggaaaccaccaagccttccaagcagtccaacaacaaatacgccgcctcctcctacctgtctctgacccctgaacagtggaagtcccaccggtcctacagctgccaagtgacccatgagggctccaccgtggaaaagaccgtggctcctaccgagtgctccggtggcggaggaagcggaggcggaggttctggcggcggaggatctgcccctaccagcagcagcaccaagaaaacccagctccagctcgagcacctcctgctggacctgcagatgatcctgaacggcatcaacaactacaagaaccccaagctgacccggatgctgaccttcaagttctacatgcccaagaaggccaccgagctgaagcacctccagtgcctggaagaggaactgaagcccctggaagaagtgctgaacctggcccagagcaagaacttccacctgaggcccagggacctgatcagcaacatcaacgtgatcgtgctggaactgaaaggcagcgagacaaccttcatgtgcgagtacgccgacgagacagccaccatcgtggaatttctgaaccggtggatcaccttctgccagagcatcatcagcaccctgaca

SEQ ID NO: 307 - DNA, 1110 bp, Artificial Sequence
  source: /note="Description of Artificial Sequence: Synthetic polynucleotide"
atggaaaccgacacactgctgctgtgggtgctgctcttgtgggtgccaggatctacaggacaactggtgctgacccagcccccttccgtctccggcgccccgggccagcgcgtcactatctcctgtaccggcagctccagcaacatcggagcaggatacgacgtgcactggtaccaacagctccccggaaccgcgcctaagctgctgatctacgggaactctaaccggccgtccggcgtgcctgaccgcttcagcggatcgaagtccggcaccagcgcctccctggccatcactggactgcaggccgaggacgaagccgattactactgccagtcctacgactcctccctgtccgaggaagtgttcggaggcgggacgaagctcaccgtcctgggacaacctaaggccaatcctaccgtgacactgttccctccatcctccgaggaactgcaggccaacaaggctaccctcgtgtgcctgatctccgacttttaccctggcgctgtgaccgtggcctggaaggctgatggatctcctgtgaaggctggcgtggaaaccaccaagccttccaagcagtccaacaacaaatacgccgcctcctcctacctgtctctgacccctgaacagtggaagtcccaccggtcctacagctgccaagtgacccatgagggctccaccgtggaaaagaccgtggctcctaccgagtgctccgcccctaccagcagcagcaccaagaaaacccagctccagctcgagcacctcctgctggacctgcagatgatcctgaacggcatcaacaactacaagaaccccaagctgacccggatgctgaccttcaagttctacatgcccaagaaggccaccgagctgaagcacctccagtgcctggaagaggaactgaagcccctggaagaagtgctgaacctggcccagagcaagaacttccacctgaggcccagggacctgatcagcaacatcaacgtgatcgtgctggaactgaaaggcagcgagacaaccttcatgtgcgagtacgccgacgagacagccaccatcgtggaatttctgaaccggtggatcaccttctgccagagcatcatcagcaccctgaca

SEQ ID NO: 308 - DNA, 1146 bp, Artificial Sequence
  source: /note="Description of Artificial Sequence: Synthetic polynucleotide"
atggaaaccgacacactgctgctgtgggtgctgctcttgtgggtgccaggatctacaggatccctcgtgctgacccaacctccttcagtctccgtggcccccggcaagaccgcccgcatcacctgtggcggtaacaacatcggctccaagtcagtccactggtaccagcagaagccgggccaagctcccgtgctggtcgtgtacgacgactcagaccgccccagcggtatccctgagagatttagcggatccaactccgggaacaccgctaccctgaccatctcaagggtggaggccggagacgaagccgactactactgccaggtgtgggattccagctccgaccacgtggtgttcggcggcggcactcagctcaccgtgctgggacaacctaaggccaatcctaccgtgacactgttccctccatcctccgaggaactgcaggccaacaaggctaccctcgtgtgcctgatctccgacttttaccctggcgctgtgaccgtggcctggaaggctgatggatctcctgtgaaggctggcgtggaaaccaccaagccttccaagcagtccaacaacaaatacgccgcctcctcctacctgtctctgacccctgaacagtggaagtcccaccggtcctacagctgccaagtgacccatgagggctccaccgtggaaaagaccgtggctcctaccgagtgctccggtggcggaggaagcggaggcggaggttctggcggcggaggatctgcccctaccagcagcagcaccaagaaaacccagctccagctcgagcacctcctgctggacctgcagatgatcctgaacggcatcaacaactacaagaaccccaagctgacccggatgctgaccttcaagttctacatgcccaagaaggccaccgagctgaagcacctccagtgcctggaagaggaactgaagcccctggaagaagtgctgaacctggcccagagcaagaacttccacctgaggcccagggacctgatcagcaacatcaacgtgatcgtgctggaactgaaaggcagcgagacaaccttcatgtgcgagtacgccgacgagacagccaccatcgtggaatttctgaaccggtggatcaccttctgccagagcatcatcagcaccctgaca

SEQ ID NO: 309 - DNA, 1101 bp, Artificial Sequence
  source: /note="Description of Artificial Sequence: Synthetic polynucleotide"
atggaaaccgacacactgctgctgtgggtgctgctcttgtgggtgccaggatctacaggatccctcgtgctgacccaacctccttcagtctccgtggcccccggcaagaccgcccgcatcacctgtggcggtaacaacatcggctccaagtcagtccactggtaccagcagaagccgggccaagctcccgtgctggtcgtgtacgacgactcagaccgccccagcggtatccctgagagatttagcggatccaactccgggaacaccgctaccctgaccatctcaagggtggaggccggagacgaagccgactactactgccaggtgtgggattccagctccgaccacgtggtgttcggcggcggcactcagctcaccgtgctgggacaacctaaggccaatcctaccgtgacactgttccctccatcctccgaggaactgcaggccaacaaggctaccctcgtgtgcctgatctccgacttttaccctggcgctgtgaccgtggcctggaaggctgatggatctcctgtgaaggctggcgtggaaaccaccaagccttccaagcagtccaacaacaaatacgccgcctcctcctacctgtctctgacccctgaacagtggaagtcccaccggtcctacagctgccaagtgacccatgagggctccaccgtggaaaagaccgtggctcctaccgagtgctccgcccctaccagcagcagcaccaagaaaacccagctccagctcgagcacctcctgctggacctgcagatgatcctgaacggcatcaacaactacaagaaccccaagctgacccggatgctgaccttcaagttctacatgcccaagaaggccaccgagctgaagcacctccagtgcctggaagaggaactgaagcccctggaagaagtgctgaacctggcccagagcaagaacttccacctgaggcccagggacctgatcagcaacatcaacgtgatcgtgctggaactgaaaggcagcgagacaaccttcatgtgcgagtacgccgacgagacagccaccatcgtggaatttctgaaccggtggatcaccttctgccagagcatcatcagcaccctgaca

SEQ ID NO: 310 - DNA, 1161 bp, Artificial Sequence
  source: /note="Description of Artificial Sequence: Synthetic polynucleotide"
atggaaaccgacacactgctgctgtgggtgctgctcttgtgggtgccaggatctacaggagacgtcgtcatgacccaatccccgctctccctgccggtgactctcggccagccggcgtccatctcgtgcaagtcctcccaatccctgctggattcggatgggaagactttcctgaactggctgcagcaacggcccggccagtcgccacggcggctgatctacctggtgtccaagctggattcaggtgtgcctgatagattctccggcagcggatcggggaccgacttcacgctgaagatctccagagtggaagcagaggacgtgggcgtctattactgttggcaggggactcatttcccctatacctttggaggtggtactaaggtggaaattaagagaacagtggccgctccttccgtgttcatcttcccaccctccgacgagcagctgaagtccggcaccgcttctgtcgtgtgcctgctcaacaacttctaccctcgggaagccaaggtgcagtggaaggtggacaacgccctgcagtccggcaactcccaggaatccgtcaccgagcaggactccaaggacagcacctactccctgtcctccaccctgaccctgtccaaggccgactacgagaagcacaaggtgtacgcctgcgaagtgacccaccagggcctgagcagccccgtgaccaagtccttcaaccggggcgagtgcggtggcggaggaagcggaggcggaggttctggcggcggaggatctgcccctaccagcagcagcaccaagaaaacccagctccagctcgagcacctcctgctggacctgcagatgatcctgaacggcatcaacaactacaagaaccccaagctgacccggatgctgaccttcaagttctacatgcccaagaaggccaccgagctgaagcacctccagtgcctggaagaggaactgaagcccctggaagaagtgctgaacctggcccagagcaagaacttccacctgaggcccagggacctgatcagcaacatcaacgtgatcgtgctggaactgaaaggcagcgagacaaccttcatgtgcgagtacgccgacgagacagccaccatcgtggaatttctgaaccggtggatcaccttctgccagagcatcatcagcaccctgaca

SEQ ID NO: 311 - DNA, 1116 bp, Artificial Sequence
  source: /note="Description of Artificial Sequence: Synthetic polynucleotide"
atggaaaccgacacactgctgctgtgggtgctgctcttgtgggtgccaggatctacaggagacgtcgtcatgacccaatccccgctctccctgccggtgactctcggccagccggcgtccatctcgtgcaagtcctcccaatccctgctggattcggatgggaagactttcctgaactggctgcagcaacggcccggccagtcgccacggcggctgatctacctggtgtccaagctggattcaggtgtgcctgatagattctccggcagcggatcggggaccgacttcacgctgaagatctccagagtggaagcagaggacgtgggcgtctattactgttggcaggggactcatttcccctatacctttggaggtggtactaaggtggaaattaagagaacagtggccgctccttccgtgttcatcttcccaccctccgacgagcagctgaagtccggcaccgcttctgtcgtgtgcctgctcaacaacttctaccctcgggaagccaaggtgcagtggaaggtggacaacgccctgcagtccggcaactcccaggaatccgtcaccgagcaggactccaaggacagcacctactccctgtcctccaccctgaccctgtccaaggccgactacgagaagcacaaggtgtacgcctgcgaagtgacccaccagggcctgagcagccccgtgaccaagtccttcaaccggggcgagtgcgcccctaccagcagcagcaccaagaaaacccagctccagctcgagcacctcctgctggacctgcagatgatcctgaacggcatcaacaactacaagaaccccaagctgacccggatgctgaccttcaagttctacatgcccaagaaggccaccgagctgaagcacctccagtgcctggaagaggaactgaagcccctggaagaagtgctgaacctggcccagagcaagaacttccacctgaggcccagggacctgatcagcaacatcaacgtgatcgtgctggaactgaaaggcagcgagacaaccttcatgtgcgagtacgccgacgagacagccaccatcgtggaatttctgaaccggtggatcaccttctgccagagcatcatcagcaccctgaca

SEQ ID NO: 312 - DNA, 1860 bp, Artificial Sequence
  source: /note="Description of Artificial Sequence: Synthetic polynucleotide"
atggaaaccgacacactgctgctgtgggtgctgctcttgtgggtgccaggatctacaggagaagtgcagctggtcgaaagcggagggggtctggtccagcctggagggtccctgcggctgtcctgcgccgcttccggcttcaccttctccaacgatgaaatgaactggatccgccaagcccctggaaagggcctggaatgggtgtcgtacatctcgagcaggtccagcactatctactatgccgacgcggtgaagggacgcttcactatcagccgcgataacgcacgcaattccctctacctgcagatgaactcgctcagagctgaggatactgccgtctactactgcgcccgcggcgtggacggcgatttttccttcgattactggggacagggcactcttgtcaccgtgtcaagcgcttctaccaagggacccagcgtgttccctctggctccttccagcaagtctacctctggcggaacagctgctctgggctgcctggtcaaggactactttcctgagcctgtgaccgtgtcttggaactctggcgctctgacatccggcgtgcacacatttccagctgtgctgcagtcctccggcctgtactctctgtcctctgtcgtgaccgtgccttccagctctctgggaacccagacctacatctgcaatgtgaaccacaagccttccaacaccaaggtggacaagagagtggaacccaagtcctgcgataagacccacacctgtcctccctgccctgcccctgaactgctgggcggacctagcgtgttcctgttccctccaaagcccaaggacaccctgatgatcagccggacccctgaagtgacctgcgtggtggtggatgtgtcccacgaggatcccgaagtgaagttcaattggtacgtggacggcgtggaagtgcacaacgccaagaccaagcccagagaggaacagtacaacagcacctaccgggtggtgtccgtgctgaccgtgctgcaccaggactggctgaacggcaaagagtacaagtgcaaggtgtccaacaaggccctgccagcccctatcgagaaaaccatcagcaaggccaagggccagcctagagagcctcaggtctgcaccctgcctcccagccgggaagagatgaccaagaaccaggtgtccctgagctgcgccgtgaagggcttctacccctccgatatcgccgtggaatgggagagcaacggccagcccgagaacaactacaagaccacccctcccgtgctggacagcgacggcagcttcttcctggtgtccaaactgaccgtggacaagagccggtggcagcagggcaatgtgttcagctgtagcgtgatgcacgaggccctgcacaaccactacacccagaagtctctgagcctgagccctggcaaaggtggcggaggaagcggaggcggaggttctggcggcggaggatctattcctccacacgtgcaaaagtcggtgaacaatgatatgatcgtcaccgacaacaacggagccgtgaagtttcctcagctgtgcaagttttgtgatgtccgcttcagcacctgtgacaaccagaagtcatgcatgtcgaactgttcgatcaccagcatttgcgaaaagcctcaagaggtgtgcgtggccgtgtggcgcaagaacgacgaaaacatcactctggaaaccgtgtgccatgatcctaagctcccgtaccatgacttcattcttgaagatgcagcctcccccaagtgcatcatgaaggagaagaagaagcctggcgaaaccttcttcatgtgctcatgcagctccgacgaatgtaacgacaacatcatcttctcagaggaatacaacacctcaaacccggac

SEQ ID NO: 313 - DNA, 1863 bp, Artificial Sequence
  source: /note="Description of Artificial Sequence: Synthetic polynucleotide"
atggaaaccgacacactgctgctgtgggtgctgctcttgtgggtgccaggatctacaggacaggtgcagcttgtgcaaagcgggggaggcgtggtgcagccgggacggagcctgcggctgtcgtgcgccgcgagcggtttcaccttctcctcctacgctatgcactgggtccgccaggcgccgggcaagggcctcgaatgggtggccgtgatcagctacgatggctccaacaagtactacgccgactcagtgaagggaaggttcaccatctcaagagataacagcaagaacacgctgtacctccagatgaactccctccgggccgaagacacagccgtctactactgtgcgagagagctcgattacggcgattacggcctggacgtgtggggcaagggaaccacggtgaccgtctcctccgcttctaccaagggacccagcgtgttccctctggctccttccagcaagtctacctctggcggaacagctgctctgggctgcctggtcaaggactactttcctgagcctgtgaccgtgtcttggaactctggcgctctgacatccggcgtgcacacatttccagctgtgctgcagtcctccggcctgtactctctgtcctctgtcgtgaccgtgccttccagctctctgggaacccagacctacatctgcaatgtgaaccacaagccttccaacaccaaggtggacaagagagtggaacccaagtcctgcgataagacccacacctgtcctccctgccctgcccctgaactgctgggcggacctagcgtgttcctgttccctccaaagcccaaggacaccctgatgatcagccggacccctgaagtgacctgcgtggtggtggatgtgtcccacgaggatcccgaagtgaagttcaattggtacgtggacggcgtggaagtgcacaacgccaagaccaagcccagagaggaacagtacaacagcacctaccgggtggtgtccgtgctgaccgtgctgcaccaggactggctgaacggcaaagagtacaagtgcaaggtgtccaacaaggccctgccagcccctatcgagaaaaccatcagcaaggccaagggccagcctagagagcctcaggtctgcaccctgcctcccagccgggaagagatgaccaagaaccaggtgtccctgagctgcgccgtgaagggcttctacccctccgatatcgccgtggaatgggagagcaacggccagcccgagaacaactacaagaccacccctcccgtgctggacagcgacggcagcttcttcctggtgtccaaactgaccgtggacaagagccggtggcagcagggcaatgtgttcagctgtagcgtgatgcacgaggccctgcacaaccactacacccagaagtctctgagcctgagccctggcaaaggtggcggaggaagcggaggcggaggttctggcggcggaggatctattcctccacacgtgcaaaagtcggtgaacaatgatatgatcgtcaccgacaacaacggagccgtgaagtttcctcagctgtgcaagttttgtgatgtccgcttcagcacctgtgacaaccagaagtcatgcatgtcgaactgttcgatcaccagcatttgcgaaaagcctcaagaggtgtgcgtggccgtgtggcgcaagaacgacgaaaacatcactctggaaaccgtgtgccatgatcctaagctcccgtaccatgacttcattcttgaagatgcagcctcccccaagtgcatcatgaaggagaagaagaagcctggcgaaaccttcttcatgtgctcatgcagctccgacgaatgtaacgacaacatcatcttctcagaggaatacaacacctcaaacccggac

SEQ ID NO: 314 - DNA, 1854 bp, Artificial Sequence
  source: /note="Description of Artificial Sequence: Synthetic polynucleotide"
atggaaaccgacacactgctgctgtgggtgctgctcttgtgggtgccaggatctacaggagaagtgcagctggtggaaagcggtggcggtctggtgcagcctggcggttccctccggctgtcatgtgctgcctccggattctcgttcaacgcgtatgccatgaactgggtgaggcaggccccgggaaagggactggaatgggtggggagaatccggaccaagaacaataactacgctacttactacgccgactccgtcaaggaccggttcacaatttcccgggacgacagcaagagctcactgtaccttcagatgaacagcctcaaaaccgaggacaccgccgtgtactactgtgccaccttttacggcaacggtgtgtggggacagggaacaactgtcaccgtgtcctccgcttctaccaagggacccagcgtgttccctctggctccttccagcaagtctacctctggcggaacagctgctctgggctgcctggtcaaggactactttcctgagcctgtgaccgtgtcttggaactctggcgctctgacatccggcgtgcacacatttccagctgtgctgcagtcctccggcctgtactctctgtcctctgtcgtgaccgtgccttccagctctctgggaacccagacctacatctgcaatgtgaaccacaagccttccaacaccaaggtggacaagagagtggaacccaagtcctgcgataagacccacacatgtcctccatgccctgcccctgagctgctgggcggaccttccgtgttcctgttccctccaaagcccaaggacaccctgatgatcagccggacccctgaagtgacctgcgtggtggtggatgtgtcccacgaggatcccgaagtgaagttcaattggtacgtggacggcgtggaagtgcacaacgccaagaccaagcccagagaggaacagtacaacagcacctaccgggtggtgtccgtgctgaccgtgctgcatcaggactggctgaacggcaaagagtacaagtgcaaggtgtccaacaaggccctgcctgcccctatcgagaaaaccatcagcaaggccaagggccagccccgcgaacctcaggtgtacacactgcctccctgccgggaagagatgaccaagaaccaggtgtccctgtggtgcctggtcaagggcttctacccctccgatatcgccgtggaatgggagagcaacggccagcccgagaacaactacaagaccacccctcccgtgctggacagcgacggcagcttcttcctgtactccaaactgaccgtggacaagagccggtggcagcagggcaatgtgttcagctgtagcgtgatgcacgaggccctgcacaaccactacacccagaagtccctgagcctgtctcctggcaaaggtggcggaggaagcggaggcggaggttctggcggcggaggatctattcctccacacgtgcaaaagtcggtgaacaatgatatgatcgtcaccgacaacaacggagccgtgaagtttcctcagctgtgcaagttttgtgatgtccgcttcagcacctgtgacaaccagaagtcatgcatgtcgaactgttcgatcaccagcatttgcgaaaagcctcaagaggtgtgcgtggccgtgtggcgcaagaacgacgaaaacatcactctggaaaccgtgtgccatgatcctaagctcccgtaccatgacttcattcttgaagatgcagcctcccccaagtgcatcatgaaggagaagaagaagcctggcgaaaccttcttcatgtgctcatgcagctccgacgaatgtaacgacaacatcatcttctcagaggaatacaacacctcaaacccggac

SEQ ID NO: 315 - DNA, 1491 bp, Artificial Sequence
  source: /note="Description of Artificial Sequence: Synthetic polynucleotide"
atggaaaccgacacactgctgctgtgggtgctgctcttgtgggtgccaggatctacaggagaagtgcagctggtcgaaagcggagggggtctggtccagcctggagggtccctgcggctgtcctgcgccgcttccggcttcaccttctccaacgatgaaatgaactggatccgccaagcccctggaaagggcctggaatgggtgtcgtacatctcgagcaggtccagcactatctactatgccgacgcggtgaagggacgcttcactatcagccgcgataacgcacgcaattccctctacctgcagatgaactcgctcagagctgaggatactgccgtctactactgcgcccgcggcgtggacggcgatttttccttcgattactggggacagggcactcttgtcaccgtgtcaagcggtggcggaggaagcggaggcggaggttctggcggcggaggatctcaactggtgctgacccagcccccttccgtctccggcgccccgggccagcgcgtcactatctcctgtaccggcagctccagcaacatcggagcaggatacgacgtgcactggtaccaacagctccccggaaccgcgcctaagctgctgatctacgggaactctaaccggccgtccggcgtgcctgaccgcttcagcggatcgaagtccggcaccagcgcctccctggccatcactggactgcaggccgaggacgaagccgattactactgccagtcctacgactcctccctgtccgaggaagtgttcggaggcgggacgaagctcaccgtcctgggtggcggaggaagcgataagacccacacctgtcctccctgccctgcccctgaactgctgggcggacctagcgtgttcctgttccctccaaagcccaaggacaccctgatgatcagccggacccctgaagtgacctgcgtggtggtggatgtgtcccacgaggatcccgaagtgaagttcaattggtacgtggacggcgtggaagtgcacaacgccaagaccaagcccagagaggaacagtacaacagcacctaccgggtggtgtccgtgctgaccgtgctgcaccaggactggctgaacggcaaagagtacaagtgcaaggtgtccaacaaggccctgccagcccctatcgagaaaaccatcagcaaggccaagggccagcctagagagcctcaggtctgcaccctgcctcccagccgggaagagatgaccaagaaccaggtgtccctgagctgcgccgtgaagggcttctacccctccgatatcgccgtggaatgggagagcaacggccagcccgagaacaactacaagaccacccctcccgtgctggacagcgacggcagcttcttcctggtgtccaaactgaccgtggacaagagccggtggcagcagggcaatgtgttcagctgtagcgtgatgcacgaggccctgcacaaccactacacccagaagtctctgagcctgagccctggcaaa

SEQ ID NO: 316 - DNA, 1485 bp, Artificial Sequence
  source: /note="Description of Artificial Sequence: Synthetic polynucleotide"
atggaaaccgacacactgctgctgtgggtgctgctcttgtgggtgccaggatctacaggacaggtgcagcttgtgcaaagcgggggaggcgtggtgcagccgggacggagcctgcggctgtcgtgcgccgcgagcggtttcaccttctcctcctacgctatgcactgggtccgccaggcgccgggcaagggcctcgaatgggtggccgtgatcagctacgatggctccaacaagtactacgccgactcagtgaagggaaggttcaccatctcaagagataacagcaagaacacgctgtacctccagatgaactccctccgggccgaagacacagccgtctactactgtgcgagagagctcgattacggcgattacggcctggacgtgtggggcaagggaaccacggtgaccgtctcctccggtggcggaggaagcggaggcggaggttctggcggcggaggatcttccctcgtgctgacccaacctccttcagtctccgtggcccccggcaagaccgcccgcatcacctgtggcggtaacaacatcggctccaagtcagtccactggtaccagcagaagccgggccaagctcccgtgctggtcgtgtacgacgactcagaccgccccagcggtatccctgagagatttagcggatccaactccgggaacaccgctaccctgaccatctcaagggtggaggccggagacgaagccgactactactgccaggtgtgggattccagctccgaccacgtggtgttcggcggcggcactcagctcaccgtgctgggtggcggaggaagcgataagacccacacctgtcctccctgccctgcccctgaactgctgggcggacctagcgtgttcctgttccctccaaagcccaaggacaccctgatgatcagccggacccctgaagtgacctgcgtggtggtggatgtgtcccacgaggatcccgaagtgaagttcaattggtacgtggacggcgtggaagtgcacaacgccaagaccaagcccagagaggaacagtacaacagcacctaccgggtggtgtccgtgctgaccgtgctgcaccaggactggctgaacggcaaagagtacaagtgcaaggtgtccaacaaggccctgccagcccctatcgagaaaaccatcagcaaggccaagggccagcctagagagcctcaggtctgcaccctgcctcccagccgggaagagatgaccaagaaccaggtgtccctgagctgcgccgtgaagggcttctacccctccgatatcgccgtggaatgggagagcaacggccagcccgagaacaactacaagaccacccctcccgtgctggacagcgacggcagcttcttcctggtgtccaaactgaccgtggacaagagccggtggcagcagggcaatgtgttcagctgtagcgtgatgcacgaggccctgcacaaccactacacccagaagtctctgagcctgagccctggcaaa

SEQ ID NO: 317 - DNA, 1944 bp, Artificial Sequence
  source: /note="Description of Artificial Sequence: Synthetic polynucleotide"
atggaaaccgacacactgctgctgtgggtgctgctcttgtgggtgccaggatctacaggagaagtgcagctggtcgaaagcggagggggtctggtccagcctggagggtccctgcggctgtcctgcgccgcttccggcttcaccttctccaacgatgaaatgaactggatccgccaagcccctggaaagggcctggaatgggtgtcgtacatctcgagcaggtccagcactatctactatgccgacgcggtgaagggacgcttcactatcagccgcgataacgcacgcaattccctctacctgcagatgaactcgctcagagctgaggatactgccgtctactactgcgcccgcggcgtggacggcgatttttccttcgattactggggacagggcactcttgtcaccgtgtcaagcggtggcggaggaagcggaggcggaggttctggcggcggaggatctcaactggtgctgacccagcccccttccgtctccggcgccccgggccagcgcgtcactatctcctgtaccggcagctccagcaacatcggagcaggatacgacgtgcactggtaccaacagctccccggaaccgcgcctaagctgctgatctacgggaactctaaccggccgtccggcgtgcctgaccgcttcagcggatcgaagtccggcaccagcgcctccctggccatcactggactgcaggccgaggacgaagccgattactactgccagtcctacgactcctccctgtccgaggaagtgttcggaggcgggacgaagctcaccgtcctgggtggcggaggaagcgataagacccacacctgtcctccctgccctgcccctgaactgctgggcggacctagcgtgttcctgttccctccaaagcccaaggacaccctgatgatcagccggacccctgaagtgacctgcgtggtggtggatgtgtcccacgaggatcccgaagtgaagttcaattggtacgtggacggcgtggaagtgcacaacgccaagaccaagcccagagaggaacagtacaacagcacctaccgggtggtgtccgtgctgaccgtgctgcaccaggactggctgaacggcaaagagtacaagtgcaaggtgtccaacaaggccctgccagcccctatcgagaaaaccatcagcaaggccaagggccagcctagagagcctcaggtctgcaccctgcctcccagccgggaagagatgaccaagaaccaggtgtccctgagctgcgccgtgaagggcttctacccctccgatatcgccgtggaatgggagagcaacggccagcccgagaacaactacaagaccacccctcccgtgctggacagcgacggcagcttcttcctggtgtccaaactgaccgtggacaagagccggtggcagcagggcaatgtgttcagctgtagcgtgatgcacgaggccctgcacaaccactacacccagaagtctctgagcctgagccctggcaaaggtggcggaggaagcggaggcggaggttctggcggcggaggatctattcctccacacgtgcaaaagtcggtgaacaatgatatgatcgtcaccgacaacaacggagccgtgaagtttcctcagctgtgcaagttttgtgatgtccgcttcagcacctgtgacaaccagaagtcatgcatgtcgaactgttcgatcaccagcatttgcgaaaagcctcaagaggtgtgcgtggccgtgtggcgcaagaacgacgaaaacatcactctggaaaccgtgtgccatgatcctaagctcccgtaccatgacttcattcttgaagatgcagcctcccccaagtgcatcatgaaggagaagaagaagcctggcgaaaccttcttcatgtgctcatgcagctccgacgaatgtaacgacaacatcatcttctcagaggaatacaacacctcaaacccggac

SEQ ID NO: 318 - DNA, 1938 bp, Artificial Sequence
  source: /note="Description of Artificial Sequence: Synthetic polynucleotide"
atggaaaccgacacactgctgctgtgggtgctgctcttgtgggtgccaggatctacaggacaggtgcagcttgtgcaaagcgggggaggcgtggtgcagccgggacggagcctgcggctgtcgtgcgccgcgagcggtttcaccttctcctcctacgctatgcactgggtccgccaggcgccgggcaagggcctcgaatgggtggccgtgatcagctacgatggctccaacaagtactacgccgactcagtgaagggaaggttcaccatctcaagagataacagcaagaacacgctgtacctccagatgaactccctccgggccgaagacacagccgtctactactgtgcgagagagctcgattacggcgattacggcctggacgtgtggggcaagggaaccacggtgaccgtctcctccggtggcggaggaagcggaggcggaggttctggcggcggaggatcttccctcgtgctgacccaacctccttcagtctccgtggcccccggcaagaccgcccgcatcacctgtggcggtaacaacatcggctccaagtcagtccactggtaccagcagaagccgggccaagctcccgtgctggtcgtgtacgacgactcagaccgccccagcggtatccctgagagatttagcggatccaactccgggaacaccgctaccctgaccatctcaagggtggaggccggagacgaagccgactactactgccaggtgtgggattccagctccgaccacgtggtgttcggcggcggcactcagctcaccgtgctgggtggcggaggaagcgataagacccacacctgtcctccctgccctgcccctgaactgctgggcggacctagcgtgttcctgttccctccaaagcccaaggacaccctgatgatcagccggacccctgaagtgacctgcgtggtggtggatgtgtcccacgaggatcccgaagtgaagttcaattggtacgtggacggcgtggaagtgcacaacgccaagaccaagcccagagaggaacagtacaacagcacctaccgggtggtgtccgtgctgaccgtgctgcaccaggactggctgaacggcaaagagtacaagtgcaaggtgtccaacaaggccctgccagcccctatcgagaaaaccatcagcaaggccaagggccagcctagagagcctcaggtctgcaccctgcctcccagccgggaagagatgaccaagaaccaggtgtccctgagctgcgccgtgaagggcttctacccctccgatatcgccgtggaatgggagagcaacggccagcccgagaacaactacaagaccacccctcccgtgctggacagcgacggcagcttcttcctggtgtccaaactgaccgtggacaagagccggtggcagcagggcaatgtgttcagctgtagcgtgatgcacgaggccctgcacaaccactacacccagaagtctctgagcctgagccctggcaaaggtggcggaggaagcggaggcggaggttctggcggcggaggatctattcctccacacgtgcaaaagtcggtgaacaatgatatgatcgtcaccgacaacaacggagccgtgaagtttcctcagctgtgcaagttttgtgatgtccgcttcagcacctgtgacaaccagaagtcatgcatgtcgaactgttcgatcaccagcatttgcgaaaagcctcaagaggtgtgcgtggccgtgtggcgcaagaacgacgaaaacatcactctggaaaccgtgtgccatgatcctaagctcccgtaccatgacttcattcttgaagatgcagcctcccccaagtgcatcatgaaggagaagaagaagcctggcgaaaccttcttcatgtgctcatgcagctccgacgaatgtaacgacaacatcatcttctcagaggaatacaacacctcaaacccggac

SEQ ID NO: 319 - DNA, 1512 bp, Artificial Sequence
  source: /note="Description of Artificial Sequence: Synthetic polynucleotide"
atgggccgcggacttctgcgcgggctgtggcctctgcacatcgtgctgtggacccgcatcgcgtccactattcctccacacgtgcaaaagtcggtgaacaatgatatgatcgtcaccgacaacaacggagccgtgaagtttcctcagctgtgcaagttttgtgatgtccgcttcagcacctgtgacaaccagaagtcatgcatgtcgaactgttcgatcaccagcatttgcgaaaagcctcaagaggtgtgcgtggccgtgtggcgcaagaacgacgaaaacatcactctggaaaccgtgtgccatgatcctaagctcccgtaccatgacttcattcttgaagatgcagcctcccccaagtgcatcatgaaggagaagaagaagcctggcgaaaccttcttcatgtgctcatgcagctccgacgaatgtaacgacaacatcatcttctcagaggaatacaacacctcaaacccggacggtggcggaggaagcggaggcggaggttctggcggcggaggatctgcttctaccaagggacccagcgtgttccctctggctccttccagcaagtctacctctggcggaacagctgctctgggctgcctggtcaaggactactttcctgagcctgtgaccgtgtcttggaactctggcgctctgacatccggcgtgcacacatttccagctgtgctgcagtcctccggcctgtactctctgtcctctgtcgtgaccgtgccttccagctctctgggaacccagacctacatctgcaatgtgaaccacaagccttccaacaccaaggtggacaagagagtggaacccaagtcctgcgataagacccacacctgtcctccctgccctgcccctgaactgctgggcggacctagcgtgttcctgttccctccaaagcccaaggacaccctgatgatcagccggacccctgaagtgacctgcgtggtggtggatgtgtcccacgaggatcccgaagtgaagttcaattggtacgtggacggcgtggaagtgcacaacgccaagaccaagcccagagaggaacagtacaacagcacctaccgggtggtgtccgtgctgaccgtgctgcaccaggactggctgaacggcaaagagtacaagtgcaaggtgtccaacaaggccctgccagcccctatcgagaaaaccatcagcaaggccaagggccagcctagagagcctcaggtctgcaccctgcctcccagccgggaagagatgaccaagaaccaggtgtccctgagctgcgccgtgaagggcttctacccctccgatatcgccgtggaatgggagagcaacggccagcccgagaacaactacaagaccacccctcccgtgctggacagcgacggcagcttcttcctggtgtccaaactgaccgtggacaagagccggtggcagcagggcaatgtgttcagctgtagcgtgatgcacgaggccctgcacaaccactacacccagaagtctctgagcctgagccctggcaaa

SEQ ID NO: 320 - DNA, 840 bp, Artificial Sequence
  source: /note="Description of Artificial Sequence: Synthetic polynucleotide"
atgggccgcggacttctgcgcgggctgtggcctctgcacatcgtgctgtggacccgcatcgcgtccactattcctccacacgtgcaaaagtcggtgaacaatgatatgatcgtcaccgacaacaacggagccgtgaagtttcctcagctgtgcaagttttgtgatgtccgcttcagcacctgtgacaaccagaagtcatgcatgtcgaactgttcgatcaccagcatttgcgaaaagcctcaagaggtgtgcgtggccgtgtggcgcaagaacgacgaaaacatcactctggaaaccgtgtgccatgatcctaagctcccgtaccatgacttcattcttgaagatgcagcctcccccaagtgcatcatgaaggagaagaagaagcctggcgaaaccttcttcatgtgctcatgcagctccgacgaatgtaacgacaacatcatcttctcagaggaatacaacacctcaaacccggacggtggcggaggaagcggaggcggaggttctggcggcggaggatctggacaacctaaggccaatcctaccgtgacactgttccctccatcctccgaggaactgcaggccaacaaggctaccctcgtgtgcctgatctccgacttttaccctggcgctgtgaccgtggcctggaaggctgatggatctcctgtgaaggctggcgtggaaaccaccaagccttccaagcagtccaacaacaaatacgccgcctcctcctacctgtctctgacccctgaacagtggaagtcccaccggtcctacagctgccaagtgacccatgagggctccaccgtggaaaagaccgtggctcctaccgagtgctcc

SEQ ID NO: 321 - DNA, 2181 bp, Artificial Sequence
  source: /note="Description of Artificial Sequence: Synthetic polynucleotide"
atggaaaccgacacactgctgctgtgggtgctgctcttgtgggtgccaggatctacaggagaagtgcagctggtggaaagcggtggcggtctggtgcagcctggcggttccctccggctgtcatgtgctgcctccggattctcgttcaacgcgtatgccatgaactgggtgaggcaggccccgggaaagggactggaatgggtggggagaatccggaccaagaacaataactacgctacttactacgccgactccgtcaaggaccggttcacaatttcccgggacgacagcaagagctcactgtaccttcagatgaacagcctcaaaaccgaggacaccgccgtgtactactgtgccaccttttacggcaacggtgtgtggggacagggaacaactgtcaccgtgtcctccgcttctaccaagggacccagcgtgttccctctggctccttccagcaagtctacctctggcggaacagctgctctgggctgcctggtcaaggactactttcctgagcctgtgaccgtgtcttggaactctggcgctctgacatccggcgtgcacacatttccagctgtgctgcagtcctccggcctgtactctctgtcctctgtcgtgaccgtgccttccagctctctgggaacccagacctacatctgcaatgtgaaccacaagccttccaacaccaaggtggacaagagagtggaacccaagtcctgcgataagacccacacatgtcctccatgccctgcccctgagctgctgggcggaccttccgtgttcctgttccctccaaagcccaaggacaccctgatgatcagccggacccctgaagtgacctgcgtggtggtggatgtgtcccacgaggatcccgaagtgaagttcaattggtacgtggacggcgtggaagtgcacaacgccaagaccaagcccagagaggaacagtacaacagcacctaccgggtggtgtccgtgctgaccgtgctgcatcaggactggctgaacggcaaagagtacaagtgcaaggtgtccaacaaggccctgcctgcccctatcgagaaaaccatcagcaaggccaagggccagccccgcgaacctcaggtgtacacactgcctccctgccgggaagagatgaccaagaaccaggtgtccctgtggtgcctggtcaagggcttctacccctccgatatcgccgtggaatgggagagcaacggccagcccgagaacaactacaagaccacccctcccgtgctggacagcgacggcagcttcttcctgtactccaaactgaccgtggacaagagccggtggcagcagggcaatgtgttcagctgtagcgtgatgcacgaggccctgcacaaccactacacccagaagtccctgagcctgtctcctggcaaaggtggcggaggaagcggaggcggaggttctggcggcggaggatctgaagtgcagctggtcgaaagcggagggggtctggtccagcctggagggtccctgcggctgtcctgcgccgcttccggcttcaccttctccaacgatgaaatgaactggatccgccaagcccctggaaagggcctggaatgggtgtcgtacatctcgagcaggtccagcactatctactatgccgacgcggtgaagggacgcttcactatcagccgcgataacgcacgcaattccctctacctgcagatgaactcgctcagagctgaggatactgccgtctactactgcgcccgcggcgtggacggcgatttttccttcgattactggggacagggcactcttgtcaccgtgtcaagcggtggcggaggaagcggaggcggaggttctggcggcggaggatctcaactggtgctgacccagcccccttccgtctccggcgccccgggccagcgcgtcactatctcctgtaccggcagctccagcaacatcggagcaggatacgacgtgcactggtaccaacagctccccggaaccgcgcctaagctgctgatctacgggaactctaaccggccgtccggcgtgcctgaccgcttcagcggatcgaagtccggcaccagcgcctccctggccatcactggactgcaggccgaggacgaagccgattactactgccagtcctacgactcctccctgtccgaggaagtgttcggaggcgggacgaagctcaccgtcctg

SEQ ID NO: 322 - DNA, 2175 bp, Artificial Sequence
  source: /note="Description of Artificial Sequence: Synthetic polynucleotide"
atggaaaccgacacactgctgctgtgggtgctgctcttgtgggtgccaggatctacaggagaagtgcagctggtggaaagcggtggcggtctggtgcagcctggcggttccctccggctgtcatgtgctgcctccggattctcgttcaacgcgtatgccatgaactgggtgaggcaggccccgggaaagggactggaatgggtggggagaatccggaccaagaacaataactacgctacttactacgccgactccgtcaaggaccggttcacaatttcccgggacgacagcaagagctcactgtaccttcagatgaacagcctcaaaaccgaggacaccgccgtgtactactgtgccaccttttacggcaacggtgtgtggggacagggaacaactgtcaccgtgtcctccgcttctaccaagggacccagcgtgttccctctggctccttccagcaagtctacctctggcggaacagctgctctgggctgcctggtcaaggactactttcctgagcctgtgaccgtgtcttggaactctggcgctctgacatccggcgtgcacacatttccagctgtgctgcagtcctccggcctgtactctctgtcctctgtcgtgaccgtgccttccagctctctgggaacccagacctacatctgcaatgtgaaccacaagccttccaacaccaaggtggacaagagagtggaacccaagtcctgcgataagacccacacatgtcctccatgccctgcccctgagctgctgggcggaccttccgtgttcctgttccctccaaagcccaaggacaccctgatgatcagccggacccctgaagtgacctgcgtggtggtggatgtgtcccacgaggatcccgaagtgaagttcaattggtacgtggacggcgtggaagtgcacaacgccaagaccaagcccagagaggaacagtacaacagcacctaccgggtggtgtccgtgctgaccgtgctgcatcaggactggctgaacggcaaagagtacaagtgcaaggtgtccaacaaggccctgcctgcccctatcgagaaaaccatcagcaaggccaagggccagccccgcgaacctcaggtgtacacactgcctccctgccgggaagagatgaccaagaaccaggtgtccctgtggtgcctggtcaagggcttctacccctccgatatcgccgtggaatgggagagcaacggccagcccgagaacaactacaagaccacccctcccgtgctggacagcgacggcagcttcttcctgtactccaaactgaccgtggacaagagccggtggcagcagggcaatgtgttcagctgtagcgtgatgcacgaggccctgcacaaccactacacccagaagtccctgagcctgtctcctggcaaaggtggcggaggaagcggaggcggaggttctggcggcggaggatctcaggtgcagcttgtgcaaagcgggggaggcgtggtgcagccgggacggagcctgcggctgtcgtgcgccgcgagcggtttcaccttctcctcctacgctatgcactgggtccgccaggcgccgggcaagggcctcgaatgggtggccgtgatcagctacgatggctccaacaagtactacgccgactcagtgaagggaaggttcaccatctcaagagataacagcaagaacacgctgtacctccagatgaactccctccgggccgaagacacagccgtctactactgtgcgagagagctcgattacggcgattacggcctggacgtgtggggcaagggaaccacggtgaccgtctcctccggtggcggaggaagcggaggcggaggttctggcggcggaggatcttccctcgtgctgacccaacctccttcagtctccgtggcccccggcaagaccgcccgcatcacctgtggcggtaacaacatcggctccaagtcagtccactggtaccagcagaagccgggccaagctcccgtgctggtcgtgtacgacgactcagaccgccccagcggtatccctgagagatttagcggatccaactccgggaacaccgctaccctgaccatctcaagggtggaggccggagacgaagccgactactactgccaggtgtgggattccagctccgaccacgtggtgttcggcggcggcactcagctcaccgtgctg

SEQ ID NO: 323 - protein, 119 aa, Artificial Sequence
  source: /note="Description of Artificial Sequence: Synthetic polypeptide"
EVQLVESGGGLVQPGGSLRLSCAASGFTFSNDEMNWIRQAPGKGLEWVSYISSRSSTIYYADAVKGRFTISRDNARNSLYLQMNSLRAEDTAVYYCARGVDGDFSFDYWGQGTLVTVSS

SEQ ID NO: 324 - protein, 119 aa, Artificial Sequence
  source: /note="Description of Artificial Sequence: Synthetic polypeptide"
EVQLVESGGGLVQPGGSLRLSCAASGFTFSNDEMNWIRQAPGKGLEWVSYISSGSSTIYYADAVKGRFTISRDNARNSLYLQMNSLRAEDTAVYYCARGVDGDFSFDYWGQGTLVTVSS

SEQ ID NO: 325 - protein, 119 aa, Artificial Sequence
  source: /note="Description of Artificial Sequence: Synthetic polypeptide"
EVQLVESGGGLVQPGGSLRLSCAASGFTFSNDEMNWIRQAPGKGLEWVSFISGGSSTIYYADAVKGRFTISRDNARNSLYLQMNSLRAEDTAVYYCARGVDGDFSFDYWGQGTLVTVSS

SEQ ID NO: 326 - protein, 119 aa, Artificial Sequence
  source: /note="Description of Artificial Sequence: Synthetic polypeptide"
EVQLVESGGGLVQPGGSLRLSCAASGFTFSNDEMNWIRQAPGKGLEWVSYISSRSSTIYYADAVKGRFTISRDNARNSLYLQMNSLRAEDTAVYYCARNSDEDGSFDYWGQGTLVTVSS

SEQ ID NO: 327 - protein, 119 aa, Artificial Sequence
  source: /note="Description of Artificial Sequence: Synthetic polypeptide"
EVQLVESGGGLVQPGGSLRLSCAASGFTFSNDEMNWIRQAPGKGLEWVSYITSKSSTIYYADSVKGRFTISRDNARNSLYLQMNSLRAEDTAVYYCARGVDGDFSFDYWGQGTLVTVSS

SEQ ID NO: 328 - protein, 119 aa, Artificial Sequence
  source: /note="Description of Artificial Sequence: Synthetic polypeptide"
EVQLVESGGGLVQPGGSLRLSCAASGFTFSNDEMNWIRQAPGKGLEWVSYISSRSSTIYYADAVKGRFTISRDNARNSLYLQMNSLRAEDTAVYYCARGVDGDFSFDVWGQGTLVTVSS

SEQ ID NO: 329 - protein, 119 aa, Artificial Sequence
  source: /note="Description of Artificial Sequence: Synthetic polypeptide"
EVQLVESGGGLVQPGGSLRLSCAASGFTFSNDEMNWIRQAPGKGLEWVSYITSKSSTIYYADAVKGRFTISRDNARNSLYLQMNSLRAEDTAVYYCARGVDGDFSFDYWGQGTLVTVSS

SEQ ID NO: 330 - protein, 119 aa, Artificial Sequence
  source: /note="Description of Artificial Sequence: Synthetic polypeptide"
EVQLVESGGGLVQPGGSLRLSCAASGFTFSNDEMNWIRQAPGKGLEWVSYISSRSSTIYYADAVKGRFTISRDNARNSLYLQMNSLRAEDTAVYYCARSVDGDGSFDYWGQGTLVTVSS

SEQ ID NO: 331 - protein, 119 aa, Artificial Sequence
  source: /note="Description of Artificial Sequence: Synthetic polypeptide"
EVQLVESGGGLVQPGGSLRLSCAASGFTFSNDEMNWIRQAPGKGLEWVSYISSRSSTIYYADAVKGRFTISRDNARNSLYLQMNSLRAEDTAVYYCARSSDGSTSFDYWGQGTLVTVSS

SEQ ID NO: 332 - protein, 119 aa, Artificial Sequence
  source: /note="Description of Artificial Sequence: Synthetic polypeptide"
EVQLVESGGGLVQPGGSLRLSCAASGFTFSNDEMNWIRQAPGKGLEWVSYISSSSSTIYYADAVTGRFTISRDNARNSLYLQMNSLRAEDTAVYYCARGVDGDFSFDYWGQGTLVTVSS

SEQ ID NO: 333 - protein, 119 aa, Artificial Sequence
  source: /note="Description of Artificial Sequence: Synthetic polypeptide"
EVQLVESGGGLVQPGGSLRLSCAASGFTFSNDEMNWIRQAPGKGLEWVSYISSRSSTIYYADAVKGRFTISRDNARNSLYLQMNSLRAEDTAVYYCARNSDSDGSFDIWGQGTLVTVSS

SEQ ID NO: 334 - protein, 119 aa, Artificial Sequence
  source: /note="Description of Artificial Sequence: Synthetic polypeptide"
EVQLVESGGGLVQPGGSLRLSCAASGFTFSNDEMNWIRQAPGKGLEWVSYISSRSSTIYYADAVKGRFTISRDNARNSLYLQMNSLRAEDTAVYYCARGVDGDFSFDFWGQGTLVTVSS

SEQ ID NO: 335 - protein, 119 aa, Artificial Sequence
  source: /note="Description of Artificial Sequence: Synthetic polypeptide"
EVQLVESGGGLVQPGGSLRLSCAASGFTFSNDEMNWIRQAPGKGLEWVSYISSRSSTIYYADAVKGRFTISRDNARNSLYLQMNSLRAEDTAVYYCARSGRLDGSFDYWGQGTLVTVSS

SEQ ID NO: 336 - protein, 119 aa, Artificial Sequence
  source: /note="Description of Artificial Sequence: Synthetic polypeptide"
EVQLVESGGGLVQPGGSLRLSCAASGFTFSNDEMNWIRQAPGKGLEWVSYISSRSSTIYYADAVKGRFTISRDNARNSLYLQMNSLRAEDTAVYYCARGVESDFSFDYWGQGTLVTVSS

SEQ ID NO: 337 - protein, 120 aa, Artificial Sequence
  source: /note="Description of Artificial Sequence: Synthetic polypeptide"
QVQLVQSGGGVVQPGRSLRLSCAASGFTFSSYAMHWVRQAPGKGLEWVAVISYDGSNKYYADSVKGRFTISRDNSKNTLYLQMNSLRAEDTAVYYCARELDYGDYGLDVWGKGTTVTVSS

SEQ ID NO: 338 - protein, 120 aa, Artificial Sequence
  source: /note="Description of Artificial Sequence: Synthetic polypeptide"
QVQLVQSGGGVVQPGRSLRLSCAASGFTFSSYAMHWVRQAPGKGLEWVAVISYDGSNKYYADSVKGRFTISRDNSKNTLYLQMNSLRAEDTAVYYCARELDYGDWGLDVWGKGTTVTVSS

SEQ ID NO: 339 - protein, 120 aa, Artificial Sequence
  source: /note="Description of Artificial Sequence: Synthetic polypeptide"
QVQLVQSGGGVVQPGRSLRLSCAASGFTFSSYAMHWVRQAPGKGLEWVAVIPYYGSNKYYADSVKGRFTISRDNSKNTLYLQMNSLRAEDTAVYYCARELDYGDYGLDVWGKGTTVTVSS

SEQ ID NO: 340 - protein, 120 aa, Artificial Sequence
  source: /note="Description of Artificial Sequence: Synthetic polypeptide"
QVQLVQSGGGVVQPGRSLRLSCAASGFTFSSYAMHWVRQAPGKGLEWVAVISYDGSDKYYADSVKGRFTISRDNSKNTLYLQMNSLRAEDTAVYYCARELDYGDYGLDVWGKGTTVTVSS

SEQ ID NO: 341 - protein, 111 aa, Artificial Sequence
  source: /note="Description of Artificial Sequence: Synthetic polypeptide"
QLVLTQPPSVSGAPGQRVTISCTGSSSNIGAGYDVHWYQQLPGTAPKLLIYGNSNRPSGVPDRFSGSKSGTSASLAITGLQAEDEADYYCQSYDSSLSEEVFGGGTKLTVL

SEQ ID NO: 342 - protein, 108 aa, Artificial Sequence
  source: /note="Description of Artificial Sequence: Synthetic polypeptide"
SLVLTQPPSVSVAPGKTARITCGGNNIGSKSVHWYQQKPGQAPVLVVYDDSDRPSGIPERFSGSNSGNTATLTISRVEAGDEADYYCQVWDSSSDHVVFGGGTQLTVL

SEQ ID NO: 343 - protein, 117 aa, Artificial Sequence
  source: /note="Description of Artificial Sequence: Synthetic polypeptide"
EVQLVESGGGLVKPGGSLRLSCAASGFSFNAYAMNWVRQAPGKGLEWVGRIRTKNNNYATYYADSVKDRFTISRDDSKSTLYLQMNSLKTEDTAVYYCTTFYGNGVWGQGTTVTVSS

SEQ ID NO: 344 - protein, 117 aa, Artificial Sequence
  source: /note="Description of Artificial Sequence: Synthetic polypeptide"
EVQLVESGGGLVQPGGSLRLSCAASGFSFNAYAMNWVRQAPGKGLEWVGRIRTKNNNYATYYADSVKDRFTISRDDSKSSLYLQMNSLKTEDTAVYYCATFYGNGVWGQGTTVTVSS

SEQ ID NO: 345 - protein, 112 aa, Artificial Sequence
  source: /note="Description of Artificial Sequence: Synthetic polypeptide"
DVVMTQSPLSLPVTLGQPASISCKSSQSLLDSDGKTFLNWLQQRPGQSPRRLIYLVSKLDSGVPDRFSGSGSGTDFTLKISRVEAEDVGVYYCWQGTHFPYTFGGGTKVEIK

SEQ ID NO: 346 - protein, 119 aa, Artificial Sequence
  source: /note="Description of Artificial Sequence: Synthetic polypeptide"
QVQLVQSGAEVKKPGSSVKVSCKASGGTFSSYAISWVRQAPGQGLEWMGGIIPIFGTANYAQKFQGRVTITADKSTSTAYMELSSLRSEDTAVYYCARGGYSYGSLDYWGQGTLVTVSS

SEQ ID NO: 347 - protein, 107 aa, Artificial Sequence
  source: /note="Description of Artificial Sequence: Synthetic polypeptide"
DIQMTQSPSSLSASVGDRVTITCRASQSIISDLNWYQQKPGKAPKLLIHAASSLQSGVPSRFSGSGSGTDFTLTISSLQPEDFATYYCQQSYSTPYTFGQGTKLEIK

SEQ ID NO: 348 - protein, 23 aa, Artificial Sequence
  source: /note="Description of Artificial Sequence: Synthetic peptide"
MGRGLLRGLWPLHIVLWTRIAST

SEQ ID NO: 349 - protein, 15 aa, Artificial Sequence
  source: /note="Description of Artificial Sequence: Synthetic peptide"
GGGGSGGGGSGGGGS

SEQ ID NO: 350 - protein, 5 aa, Artificial Sequence
  source: /note="Description of Artificial Sequence: Synthetic peptide"
GGGGS

SEQ ID NO: 351 - protein, 449 aa, Artificial Sequence
  source: /note="Description of Artificial Sequence: Synthetic polypeptide"
  VARIANT (449)..(449): /replace=" "
  SITE (1)..(449): /note="Variant residues given in the sequence have no preference with respect to those in the annotations for variant positions"
EVQLVESGGGLVQPGGSLRLSCAASGFTFSNDEMNWIRQAPGKGLEWVSYISSRSSTIYYADAVKGRFTISRDNARNSLYLQMNSLRAEDTAVYYCARGVDGDFSFDYWGQGTLVTVSSASTKGPSVFPLAPSSKSTSGGTAALGCLVKDYFPEPVTVSWNSGALTSGVHTFPAVLQSSGLYSLSSVVTVPSSSLGTQTYICNVNHKPSNTKVDKRVEPKSCDKTHTCPPCPAPELLGGPSVFLFPPKPKDTLMISRTPEVTCVVVDVSHEDPEVKFNWYVDGVEVHNAKTKPREEQYNSTYRVVSVLTVLHQDWLNGKEYKCKVSNKALPAPIEKTISKAKGQPREPQVCTLPPSREEMTKNQVSLSCAVKGFYPSDIAVEWESNGQPENNYKTTPPVLDSDGSFFLVSKLTVDKSRWQQGNVFSCSVMHEALHNHYTQKSLSLSPGK

SEQ ID NO: 352 - protein, 449 aa, Artificial Sequence
  source: /note="Description of Artificial Sequence: Synthetic polypeptide"
  VARIANT (449)..(449): /replace=" "
  SITE (1)..(449): /note="Variant residues given in the sequence have no preference with respect to those in the annotations for variant positions"
EVQLVESGGGLVQPGGSLRLSCAASGFTFSNDEMNWIRQAPGKGLEWVSYISSGSSTIYYADAVKGRFTISRDNARNSLYLQMNSLRAEDTAVYYCARGVDGDFSFDYWGQGTLVTVSSASTKGPSVFPLAPSSKSTSGGTAALGCLVKDYFPEPVTVSWNSGALTSGVHTFPAVLQSSGLYSLSSVVTVPSSSLGTQTYICNVNHKPSNTKVDKRVEPKSCDKTHTCPPCPAPELLGGPSVFLFPPKPKDTLMISRTPEVTCVVVDVSHEDPEVKFNWYVDGVEVHNAKTKPREEQYNSTYRVVSVLTVLHQDWLNGKEYKCKVSNKALPAPIEKTISKAKGQPREPQVCTLPPSREEMTKNQVSLSCAVKGFYPSDIAVEWESNGQPENNYKTTPPVLDSDGSFFLVSKLTVDKSRWQQGNVFSCSVMHEALHNHYTQKSLSLSPGK

SEQ ID NO: 353 - protein, 449 aa, Artificial Sequence
  source: /note="Description of Artificial Sequence: Synthetic polypeptide"
  VARIANT (449)..(449): /replace=" "
  SITE (1)..(449): /note="Variant residues given in the sequence have no preference with respect to those in the annotations for variant positions"
EVQLVESGGGLVQPGGSLRLSCAASGFTFSNDEMNWIRQAPGKGLEWVSFISGGSSTIYYADAVKGRFTISRDNARNSLYLQMNSLRAEDTAVYYCARGVDGDFSFDYWGQGTLVTVSSASTKGPSVFPLAPSSKSTSGGTAALGCLVKDYFPEPVTVSWNSGALTSGVHTFPAVLQSSGLYSLSSVVTVPSSSLGTQTYICNVNHKPSNTKVDKRVEPKSCDKTHTCPPCPAPELLGGPSVFLFPPKPKDTLMISRTPEVTCVVVDVSHEDPEVKFNWYVDGVEVHNAKTKPREEQYNSTYRVVSVLTVLHQDWLNGKEYKCKVSNKALPAPIEKTISKAKGQPREPQVCTLPPSREEMTKNQVSLSCAVKGFYPSDIAVEWESNGQPENNYKTTPPVLDSDGSFFLVSKLTVDKSRWQQGNVFSCSVMHEALHNHYTQKSLSLSPGK

SEQ ID NO: 354 - protein, 449 aa, Artificial Sequence
  source: /note="Description of Artificial Sequence: Synthetic polypeptide"
  VARIANT (449)..(449): /replace=" "
  SITE (1)..(449): /note="Variant residues given in the sequence have no preference with respect to those in the annotations for variant positions"
EVQLVESGGGLVQPGGSLRLSCAASGFTFSNDEMNWIRQAPGKGLEWVSYISSRSSTIYYADAVKGRFTISRDNARNSLYLQMNSLRAEDTAVYYCARNSDEDGSFDYWGQGTLVTVSSASTKGPSVFPLAPSSKSTSGGTAALGCLVKDYFPEPVTVSWNSGALTSGVHTFPAVLQSSGLYSLSSVVTVPSSSLGTQTYICNVNHKPSNTKVDKRVEPKSCDKTHTCPPCPAPELLGGPSVFLFPPKPKDTLMISRTPEVTCVVVDVSHEDPEVKFNWYVDGVEVHNAKTKPREEQYNSTYRVVSVLTVLHQDWLNGKEYKCKVSNKALPAPIEKTISKAKGQPREPQVCTLPPSREEMTKNQVSLSCAVKGFYPSDIAVEWESNGQPENNYKTTPPVLDSDGSFFLVSKLTVDKSRWQQGNVFSCSVMHEALHNHYTQKSLSLSPGK

SEQ ID NO: 355 - protein, 449 aa, Artificial Sequence
  source: /note="Description of Artificial Sequence: Synthetic polypeptide"
  VARIANT (449)..(449): /replace=" "
  SITE (1)..(449): /note="Variant residues given in the sequence have no preference with respect to those in the annotations for variant positions"
EVQLVESGGGLVQPGGSLRLSCAASGFTFSNDEMNWIRQAPGKGLEWVSYITSKSSTIYYADSVKGRFTISRDNARNSLYLQMNSLRAEDTAVYYCARGVDGDFSFDYWGQGTLVTVSSASTKGPSVFPLAPSSKSTSGGTAALGCLVKDYFPEPVTVSWNSGALTSGVHTFPAVLQSSGLYSLSSVVTVPSSSLGTQTYICNVNHKPSNTKVDKRVEPKSCDKTHTCPPCPAPELLGGPSVFLFPPKPKDTLMISRTPEVTCVVVDVSHEDPEVKFNWYVDGVEVHNAKTKPREEQYNSTYRVVSVLTVLHQDWLNGKEYKCKVSNKALPAPIEKTISKAKGQPREPQVCTLPPSREEMTKNQVSLSCAVKGFYPSDIAVEWESNGQPENNYKTTPPVLDSDGSFFLVSKLTVDKSRWQQGNVFSCSVMHEALHNHYTQKSLSLSPGK

SEQ ID NO: 356 - protein, 449 aa, Artificial Sequence
  source: /note="Description of Artificial Sequence: Synthetic polypeptide"
  VARIANT (449)..(449): /replace=" "
  SITE (1)..(449): /note="Variant residues given in the sequence have no preference with respect to those in the annotations for variant positions"
EVQLVESGGGLVQPGGSLRLSCAASGFTFSNDEMNWIRQAPGKGLEWVSYISSRSSTIYYADAVKGRFTISRDNARNSLYLQMNSLRAEDTAVYYCARGVDGDFSFDVWGQGTLVTVSSASTKGPSVFPLAPSSKSTSGGTAALGCLVKDYFPEPVTVSWNSGALTSGVHTFPAVLQSSGLYSLSSVVTVPSSSLGTQTYICNVNHKPSNTKVDKRVEPKSCDKTHTCPPCPAPELLGGPSVFLFPPKPKDTLMISRTPEVTCVVVDVSHEDPEVKFNWYVDGVEVHNAKTKPREEQYNSTYRVVSVLTVLHQDWLNGKEYKCKVSNKALPAPIEKTISKAKGQPREPQVCTLPPSREEMTKNQVSLSCAVKGFYPSDIAVEWESNGQPENNYKTTPPVLDSDGSFFLVSKLTVDKSRWQQGNVFSCSVMHEALHNHYTQKSLSLSPGK

SEQ ID NO: 357 - protein, 449 aa, Artificial Sequence
  source: /note="Description of Artificial Sequence: Synthetic polypeptide"
  VARIANT (449)..(449): /replace=" "
  SITE (1)..(449): /note="Variant residues given in the sequence have no preference with respect to those in the annotations for variant positions"
EVQLVESGGGLVQPGGSLRLSCAASGFTFSNDEMNWIRQAPGKGLEWVSYITSKSSTIYYADAVKGRFTISRDNARNSLYLQMNSLRAEDTAVYYCARGVDGDFSFDYWGQGTLVTVSSASTKGPSVFPLAPSSKSTSGGTAALGCLVKDYFPEPVTVSWNSGALTSGVHTFPAVLQSSGLYSLSSVVTVPSSSLGTQTYICNVNHKPSNTKVDKRVEPKSCDKTHTCPPCPAPELLGGPSVFLFPPKPKDTLMISRTPEVTCVVVDVSHEDPEVKFNWYVDGVEVHNAKTKPREEQYNSTYRVVSVLTVLHQDWLNGKEYKCKVSNKALPAPIEKTISKAKGQPREPQVCTLPPSREEMTKNQVSLSCAVKGFYPSDIAVEWESNGQPENNYKTTPPVLDSDGSFFLVSKLTVDKSRWQQGNVFSCSVMHEALHNHYTQKSLSLSPGK

SEQ ID NO: 358 - protein, 449 aa, Artificial Sequence
  source: /note="Description of Artificial Sequence: Synthetic polypeptide"
  VARIANT (449)..(449): /replace=" "
  SITE (1)..(449): /note="Variant residues given in the sequence have no preference with respect to those in the annotations for variant positions"
EVQLVESGGGLVQPGGSLRLSCAASGFTFSNDEMNWIRQAPGKGLEWVSYISSRSSTIYYADAVKGRFTISRDNARNSLYLQMNSLRAEDTAVYYCARSVDGDGSFDYWGQGTLVTVSSASTKGPSVFPLAPSSKSTSGGTAALGCLVKDYFPEPVTVSWNSGALTSGVHTFPAVLQSSGLYSLSSVVTVPSSSLGTQTYICNVNHKPSNTKVDKRVEPKSCDKTHTCPPCPAPELLGGPSVFLFPPKPKDTLMISRTPEVTCVVVDVSHEDPEVKFNWYVDGVEVHNAKTKPREEQYNSTYRVVSVLTVLHQDWLNGKEYKCKVSNKALPAPIEKTISKAKGQPREPQVCTLPPSREEMTKNQVSLSCAVKGFYPSDIAVEWESNGQPENNYKTTPPVLDSDGSFFLVSKLTVDKSRWQQGNVFSCSVMHEALHNHYTQKSLSLSPGK

SEQ ID NO: 359 - protein, 449 aa, Artificial Sequence
  source: /note="Description of Artificial Sequence: Synthetic polypeptide"
  VARIANT (449)..(449): /replace=" "
  SITE (1)..(449): /note="Variant residues given in the sequence have no preference with respect to those in the annotations for variant positions"
EVQLVESGGGLVQPGGSLRLSCAASGFTFSNDEMNWIRQAPGKGLEWVSYISSRSSTIYYADAVKGRFTISRDNARNSLYLQMNSLRAEDTAVYYCARSSDGSTSFDYWGQGTLVTVSSASTKGPSVFPLAPSSKSTSGGTAALGCLVKDYFPEPVTVSWNSGALTSGVHTFPAVLQSSGLYSLSSVVTVPSSSLGTQTYICNVNHKPSNTKVDKRVEPKSCDKTHTCPPCPAPELLGGPSVFLFPPKPKDTLMISRTPEVTCVVVDVSHEDPEVKFNWYVDGVEVHNAKTKPREEQYNSTYRVVSVLTVLHQDWLNGKEYKCKVSNKALPAPIEKTISKAKGQPREPQVCTLPPSREEMTKNQVSLSCAVKGFYPSDIAVEWESNGQPENNYKTTPPVLDSDGSFFLVSKLTVDKSRWQQGNVFSCSVMHEALHNHYTQKSLSLSPGK

SEQ ID NO: 360 - protein, 449 aa, Artificial Sequence
  source: /note="Description of Artificial Sequence: Synthetic polypeptide"
  VARIANT (449)..(449): /replace=" "
  SITE (1)..(449): /note="Variant residues given in the sequence have no preference with respect to those in the annotations for variant positions"
EVQLVESGGGLVQPGGSLRLSCAASGFTFSNDEMNWIRQAPGKGLEWVSYISSSSSTIYYADAVTGRFTISRDNARNSLYLQMNSLRAEDTAVYYCARGVDGDFSFDYWGQGTLVTVSSASTKGPSVFPLAPSSKSTSGGTAALGCLVKDYFPEPVTVSWNSGALTSGVHTFPAVLQSSGLYSLSSVVTVPSSSLGTQTYICNVNHKPSNTKVDKRVEPKSCDKTHTCPPCPAPELLGGPSVFLFPPKPKDTLMISRTPEVTCVVVDVSHEDPEVKFNWYVDGVEVHNAKTKPREEQYNSTYRVVSVLTVLHQDWLNGKEYKCKVSNKALPAPIEKTISKAKGQPREPQVCTLPPSREEMTKNQVSLSCAVKGFYPSDIAVEWESNGQPENNYKTTPPVLDSDGSFFLVSKLTVDKSRWQQGNVFSCSVMHEALHNHYTQKSLSLSPGK

SEQ ID NO: 361 - protein, 449 aa, Artificial Sequence
  source: /note="Description of Artificial Sequence: Synthetic polypeptide"
  VARIANT (449)..(449): /replace=" "
  SITE (1)..(449): /note="Variant residues given in the sequence have no preference with respect to those in the annotations for variant positions"
EVQLVESGGGLVQPGGSLRLSCAASGFTFSNDEMNWIRQAPGKGLEWVSYISSRSSTIYYADAVKGRFTISRDNARNSLYLQMNSLRAEDTAVYYCARNSDSDGSFDIWGQGTLVTVSSASTKGPSVFPLAPSSKSTSGGTAALGCLVKDYFPEPVTVSWNSGALTSGVHTFPAVLQSSGLYSLSSVVTVPSSSLGTQTYICNVNHKPSNTKVDKRVEPKSCDKTHTCPPCPAPELLGGPSVFLFPPKPKDTLMISRTPEVTCVVVDVSHEDPEVKFNWYVDGVEVHNAKTKPREEQYNSTYRVVSVLTVLHQDWLNGKEYKCKVSNKALPAPIEKTISKAKGQPREPQVCTLPPSREEMTKNQVSLSCAVKGFYPSDIAVEWESNGQPENNYKTTPPVLDSDGSFFLVSKLTVDKSRWQQGNVFSCSVMHEALHNHYTQKSLSLSPGK

SEQ ID NO: 362 - protein, 449 aa, Artificial Sequence
  source: /note="Description of Artificial Sequence: Synthetic polypeptide"
  VARIANT (449)..(449): /replace=" "
  SITE (1)..(449): /note="Variant residues given in the sequence have no preference with respect to those in the annotations for variant positions"
EVQLVESGGGLVQPGGSLRLSCAASGFTFSNDEMNWIRQAPGKGLEWVSYISSRSSTIYYADAVKGRFTISRDNARNSLYLQMNSLRAEDTAVYYCARGVDGDFSFDFWGQGTLVTVSSASTKGPSVFPLAPSSKSTSGGTAALGCLVKDYFPEPVTVSWNSGALTSGVHTFPAVLQSSGLYSLSSVVTVPSSSLGTQTYICNVNHKPSNTKVDKRVEPKSCDKTHTCPPCPAPELLGGPSVFLFPPKPKDTLMISRTPEVTCVVVDVSHEDPEVKFNWYVDGVEVHNAKTKPREEQYNSTYRVVSVLTVLHQDWLNGKEYKCKVSNKALPAPIEKTISKAKGQPREPQVCTLPPSREEMTKNQVSLSCAVKGFYPSDIAVEWESNGQPENNYKTTPPVLDSDGSFFLVSKLTVDKSRWQQGNVFSCSVMHEALHNHYTQKSLSLSPGK

SEQ ID NO: 363 - protein, 449 aa, Artificial Sequence
  source: /note="Description of Artificial Sequence: Synthetic polypeptide"
  VARIANT (449)..(449): /replace=" "
  SITE (1)..(449): /note="Variant residues given in the sequence have no preference with respect to those in the annotations for variant positions"
EVQLVESGGGLVQPGGSLRLSCAASGFTFSNDEMNWIRQAPGKGLEWVSYISSRSSTIYYADAVKGRFTISRDNARNSLYLQMNSLRAEDTAVYYCARSGRLDGSFDYWGQGTLVTVSSASTKGPSVFPLAPSSKSTSGGTAALGCLVKDYFPEPVTVSWNSGALTSGVHTFPAVLQSSGLYSLSSVVTVPSSSLGTQTYICNVNHKPSNTKVDKRVEPKSCDKTHTCPPCPAPELLGGPSVFLFPPKPKDTLMISRTPEVTCVVVDVSHEDPEVKFNWYVDGVEVHNAKTKPREEQYNSTYRVVSVLTVLHQDWLNGKEYKCKVSNKALPAPIEKTISKAKGQPREPQVCTLPPSREEMTKNQVSLSCAVKGFYPSDIAVEWESNGQPENNYKTTPPVLDSDGSFFLVSKLTVDKSRWQQGNVFSCSVMHEALHNHYTQKSLSLSPGK

SEQ ID NO: 364 - protein, 449 aa, Artificial Sequence
  source: /note="Description of Artificial Sequence: Synthetic polypeptide"
  VARIANT (449)..(449): /replace=" "
  SITE (1)..(449): /note="Variant residues given in the sequence have no preference with respect to those in the annotations for variant positions"
EVQLVESGGGLVQPGGSLRLSCAASGFTFSNDEMNWIRQAPGKGLEWVSYISSRSSTIYYADAVKGRFTISRDNARNSLYLQMNSLRAEDTAVYYCARGVESDFSFDYWGQGTLVTVSSASTKGPSVFPLAPSSKSTSGGTAALGCLVKDYFPEPVTVSWNSGALTSGVHTFPAVLQSSGLYSLSSVVTVPSSSLGTQTYICNVNHKPSNTKVDKRVEPKSCDKTHTCPPCPAPELLGGPSVFLFPPKPKDTLMISRTPEVTCVVVDVSHEDPEVKFNWYVDGVEVHNAKTKPREEQYNSTYRVVSVLTVLHQDWLNGKEYKCKVSNKALPAPIEKTISKAKGQPREPQVCTLPPSREEMTKNQVSLSCAVKGFYPSDIAVEWESNGQPENNYKTTPPVLDSDGSFFLVSKLTVDKSRWQQGNVFSCSVMHEALHNHYTQKSLSLSPGK

SEQ ID NO: 365 - protein, 450 aa, Artificial Sequence
  source: /note="Description of Artificial Sequence: Synthetic polypeptide"
  VARIANT (450)..(450): /replace=" "
  SITE (1)..(450): /note="Variant residues given in the sequence have no preference with respect to those in the annotations for variant positions"
QVQLVQSGGGVVQPGRSLRLSCAASGFTFSSYAMHWVRQAPGKGLEWVAVISYDGSNKYYADSVKGRFTISRDNSKNTLYLQMNSLRAEDTAVYYCARELDYGDYGLDVWGKGTTVTVSSASTKGPSVFPLAPSSKSTSGGTAALGCLVKDYFPEPVTVSWNSGALTSGVHTFPAVLQSSGLYSLSSVVTVPSSSLGTQTYICNVNHKPSNTKVDKRVEPKSCDKTHTCPPCPAPELLGGPSVFLFPPKPKDTLMISRTPEVTCVVVDVSHEDPEVKFNWYVDGVEVHNAKTKPREEQYNSTYRVVSVLTVLHQDWLNGKEYKCKVSNKALPAPIEKTISKAKGQPREPQVCTLPPSREEMTKNQVSLSCAVKGFYPSDIAVEWESNGQPENNYKTTPPVLDSDGSFFLVSKLTVDKSRWQQGNVFSCSVMHEALHNHYTQKSLSLSPGK

SEQ ID NO: 366 - protein, 450 aa, Artificial Sequence
  source: /note="Description of Artificial Sequence: Synthetic polypeptide"
  VARIANT (450)..(450): /replace=" "
  SITE (1)..(450): /note="Variant residues given in the sequence have no preference with respect to those in the annotations for variant positions"
QVQLVQSGGGVVQPGRSLRLSCAASGFTFSSYAMHWVRQAPGKGLEWVAVISYDGSNKYYADSVKGRFTISRDNSKNTLYLQMNSLRAEDTAVYYCARELDYGDWGLDVWGKGTTVTVSSASTKGPSVFPLAPSSKSTSGGTAALGCLVKDYFPEPVTVSWNSGALTSGVHTFPAVLQSSGLYSLSSVVTVPSSSLGTQTYICNVNHKPSNTKVDKRVEPKSCDKTHTCPPCPAPELLGGPSVFLFPPKPKDTLMISRTPEVTCVVVDVSHEDPEVKFNWYVDGVEVHNAKTKPREEQYNSTYRVVSVLTVLHQDWLNGKEYKCKVSNKALPAPIEKTISKAKGQPREPQVCTLPPSREEMTKNQVSLSCAVKGFYPSDIAVEWESNGQPENNYKTTPPVLDSDGSFFLVSKLTVDKSRWQQGNVFSCSVMHEALHNHYTQKSLSLSPGK

SEQ ID NO: 367 - protein, 450 aa, Artificial Sequence
  source: /note="Description of Artificial Sequence: Synthetic polypeptide"
  VARIANT (450)..(450): /replace=" "
  SITE (1)..(450): /note="Variant residues given in the sequence have no preference with respect to those in the annotations for variant positions"
QVQLVQSGGGVVQPGRSLRLSCAASGFTFSSYAMHWVRQAPGKGLEWVAVIPYYGSNKYYADSVKGRFTISRDNSKNTLYLQMNSLRAEDTAVYYCARELDYGDYGLDVWGKGTTVTVSSASTKGPSVFPLAPSSKSTSGGTAALGCLVKDYFPEPVTVSWNSGALTSGVHTFPAVLQSSGLYSLSSVVTVPSSSLGTQTYICNVNHKPSNTKVDKRVEPKSCDKTHTCPPCPAPELLGGPSVFLFPPKPKDTLMISRTPEVTCVVVDVSHEDPEVKFNWYVDGVEVHNAKTKPREEQYNSTYRVVSVLTVLHQDWLNGKEYKCKVSNKALPAPIEKTISKAKGQPREPQVCTLPPSREEMTKNQVSLSCAVKGFYPSDIAVEWESNGQPENNYKTTPPVLDSDGSFFLVSKLTVDKSRWQQGNVFSCSVMHEALHNHYTQKSLSLSPGK

SEQ ID NO: 368 - protein, 450 aa, Artificial Sequence
  source: /note="Description of Artificial Sequence: Synthetic polypeptide"
  VARIANT (450)..(450): /replace=" "
  SITE (1)..(450): /note="Variant residues given in the sequence have no preference with respect to those in the annotations for variant positions"
QVQLVQSGGGVVQPGRSLRLSCAASGFTFSSYAMHWVRQAPGKGLEWVAVISYDGSDKYYADSVKGRFTISRDNSKNTLYLQMNSLRAEDTAVYYCARELDYGDYGLDVWGKGTTVTVSSASTKGPSVFPLAPSSKSTSGGTAALGCLVKDYFPEPVTVSWNSGALTSGVHTFPAVLQSSGLYSLSSVVTVPSSSLGTQTYICNVNHKPSNTKVDKRVEPKSCDKTHTCPPCPAPELLGGPSVFLFPPKPKDTLMISRTPEVTCVVVDVSHEDPEVKFNWYVDGVEVHNAKTKPREEQYNSTYRVVSVLTVLHQDWLNGKEYKCKVSNKALPAPIEKTISKAKGQPREPQVCTLPPSREEMTKNQVSLSCAVKGFYPSDIAVEWESNGQPENNYKTTPPVLDSDGSFFLVSKLTVDKSRWQQGNVFSCSVMHEALHNHYTQKSLSLSPGK

SEQ ID NO: 369 - protein, 217 aa, Artificial Sequence
  source: /note="Description of Artificial Sequence: Synthetic polypeptide"
QLVLTQPPSVSGAPGQRVTISCTGSSSNIGAGYDVHWYQQLPGTAPKLLIYGNSNRPSGVPDRFSGSKSGTSASLAITGLQAEDEADYYCQSYDSSLSEEVFGGGTKLTVLGQPKANPTVTLFPPSSEELQANKATLVCLISDFYPGAVTVAWKADGSPVKAGVETTKPSKQSNNKYAASSYLSLTPEQWKSHRSYSCQVTHEGSTVEKTVAPTECS

SEQ ID NO: 370 - protein, 214 aa, Artificial Sequence
  source: /note="Description of Artificial Sequence: Synthetic polypeptide"
SLVLTQPPSVSVAPGKTARITCGGNNIGSKSVHWYQQKPGQAPVLVVYDDSDRPSGIPERFSGSNSGNTATLTISRVEAGDEADYYCQVWDSSSDHVVFGGGTQLTVLGQPKANPTVTLFPPSSEELQANKATLVCLISDFYPGAVTVAWKADGSPVKAGVETTKPSKQSNNKYAASSYLSLTPEQWKSHRSYSCQVTHEGSTVEKTVAPTECS

SEQ ID NO: 371 - protein, 447 aa, Artificial Sequence
  source: /note="Description of Artificial Sequence: Synthetic polypeptide"
  VARIANT (447)..(447): /replace=" "
  SITE (1)..(447): /note="Variant residues given in the sequence have no preference with respect to those in the annotations for variant positions"
EVQLVESGGGLVKPGGSLRLSCAASGFSFNAYAMNWVRQAPGKGLEWVGRIRTKNNNYATYYADSVKDRFTISRDDSKSTLYLQMNSLKTEDTAVYYCTTFYGNGVWGQGTTVTVSSASTKGPSVFPLAPSSKSTSGGTAALGCLVKDYFPEPVTVSWNSGALTSGVHTFPAVLQSSGLYSLSSVVTVPSSSLGTQTYICNVNHKPSNTKVDKRVEPKSCDKTHTCPPCPAPELLGGPSVFLFPPKPKDTLMISRTPEVTCVVVDVSHEDPEVKFNWYVDGVEVHNAKTKPREEQYNSTYRVVSVLTVLHQDWLNGKEYKCKVSNKALPAPIEKTISKAKGQPREPQVYTLPPCREEMTKNQVSLWCLVKGFYPSDIAVEWESNGQPENNYKTTPPVLDSDGSFFLYSKLTVDKSRWQQGNVFSCSVMHEALHNHYTQKSLSLSPGK

SEQ ID NO: 372 - protein, 447 aa, Artificial Sequence
  source: /note="Description of Artificial Sequence: Synthetic polypeptide"
  VARIANT (447)..(447): /replace=" "
  SITE (1)..(447): /note="Variant residues given in the sequence have no preference with respect to those in the annotations for variant positions"
EVQLVESGGGLVQPGGSLRLSCAASGFSFNAYAMNWVRQAPGKGLEWVGRIRTKNNNYATYYADSVKDRFTISRDDSKSSLYLQMNSLKTEDTAVYYCATFYGNGVWGQGTTVTVSSASTKGPSVFPLAPSSKSTSGGTAALGCLVKDYFPEPVTVSWNSGALTSGVHTFPAVLQSSGLYSLSSVVTVPSSSLGTQTYICNVNHKPSNTKVDKRVEPKSCDKTHTCPPCPAPELLGGPSVFLFPPKPKDTLMISRTPEVTCVVVDVSHEDPEVKFNWYVDGVEVHNAKTKPREEQYNSTYRVVSVLTVLHQDWLNGKEYKCKVSNKALPAPIEKTISKAKGQPREPQVYTLPPCREEMTKNQVSLWCLVKGFYPSDIAVEWESNGQPENNYKTTPPVLDSDGSFFLYSKLTVDKSRWQQGNVFSCSVMHEALHNHYTQKSLSLSPGK

SEQ ID NO: 373 - protein, 219 aa, Artificial Sequence
  source: /note="Description of Artificial Sequence: Synthetic polypeptide"
DVVMTQSPLSLPVTLGQPASISCKSSQSLLDSDGKTFLNWLQQRPGQSPRRLIYLVSKLDSGVPDRFSGSGSGTDFTLKISRVEAEDVGVYYCWQGTHFPYTFGGGTKVEIKRTVAAPSVFIFPPSDEQLKSGTASVVCLLNNFYPREAKVQWKVDNALQSGNSQESVTEQDSKDSTYSLSSTLTLSKADYEKHKVYACEVTHQGLSSPVTKSFNRGEC

SEQ ID NO: 374 - protein, 705 aa, Artificial Sequence
  source: /note="Description of Artificial Sequence: Synthetic polypeptide"
  VARIANT (449)..(449): /replace=" "
  SITE (1)..(705): /note="Variant residues given in the sequence have no preference with respect to those in the annotations for variant positions"
EVQLVESGGGLVQPGGSLRLSCAASGFTFSNDEMNWIRQAPGKGLEWVSYISSRSSTIYYADAVKGRFTISRDNARNSLYLQMNSLRAEDTAVYYCARGVDGDFSFDYWGQGTLVTVSSASTKGPSVFPLAPSSKSTSGGTAALGCLVKDYFPEPVTVSWNSGALTSGVHTFPAVLQSSGLYSLSSVVTVPSSSLGTQTYICNVNHKPSNTKVDKRVEPKSCDKTHTCPPCPAPELLGGPSVFLFPPKPKDTLMISRTPEVTCVVVDVSHEDPEVKFNWYVDGVEVHNAKTKPREEQYNSTYRVVSVLTVLHQDWLNGKEYKCKVSNKALPAPIEKTISKAKGQPREPQVCTLPPSREEMTKNQVSLSCAVKGFYPSDIAVEWESNGQPENNYKTTPPVLDSDGSFFLVSKLTVDKSRWQQGNVFSCSVMHEALHNHYTQKSLSLSPGKGGGGSGGGGSGGGGSQVQLVQSGAEVKKPGSSVKVSCKASGGTFSSYAISWVRQAPGQGLEWMGGIIPIFGTANYAQKFQGRVTITADKSTSTAYMELSSLRSEDTAVYYCARGGYSYGSLDYWGQGTLVTVSSGGGGSGGGGSGGGGSDIQMTQSPSSLSASVGDRVTITCRASQSIISDLNWYQQKPGKAPKLLIHAASSLQSGVPSRFSGSGSGTDFTLTISSLQPEDFATYYCQQSYSTPYTFGQGTKLEIK

SEQ ID NO: 375 - protein, 706 aa, Artificial Sequence
  source: /note="Description of Artificial Sequence: Synthetic polypeptide"
  VARIANT (450)..(450): /replace=" "
  SITE (1)..(706): /note="Variant residues given in the sequence have no preference with respect to those in the annotations for variant positions"
QVQLVQSGGGVVQPGRSLRLSCAASGFTFSSYAMHWVRQAPGKGLEWVAVISYDGSNKYYADSVKGRFTISRDNSKNTLYLQMNSLRAEDTAVYYCARELDYGDYGLDVWGKGTTVTVSSASTKGPSVFPLAPSSKSTSGGTAALGCLVKDYFPEPVTVSWNSGALTSGVHTFPAVLQSSGLYSLSSVVTVPSSSLGTQTYICNVNHKPSNTKVDKRVEPKSCDKTHTCPPCPAPELLGGPSVFLFPPKPKDTLMISRTPEVTCVVVDVSHEDPEVKFNWYVDGVEVHNAKTKPREEQYNSTYRVVSVLTVLHQDWLNGKEYKCKVSNKALPAPIEKTISKAKGQPREPQVCTLPPSREEMTKNQVSLSCAVKGFYPSDIAVEWESNGQPENNYKTTPPVLDSDGSFFLVSKLTVDKSRWQQGNVFSCSVMHEALHNHYTQKSLSLSPGKGGGGSGGGGSGGGGSQVQLVQSGAEVKKPGSSVKVSCKASGGTFSSYAISWVRQAPGQGLEWMGGIIPIFGTANYAQKFQGRVTITADKSTSTAYMELSSLRSEDTAVYYCARGGYSYGSLDYWGQGTLVTVSSGGGGSGGGGSGGGGSDIQMTQSPSSLSASVGDRVTITCRASQSIISDLNWYQQKPGKAPKLLIHAASSLQSGVPSRFSGSGSGTDFTLTISSLQPEDFATYYCQQSYSTPYTFGQGTKLEIK

SEQ ID NO: 376 - protein, 703 aa, Artificial Sequence
  source: /note="Description of Artificial Sequence: Synthetic polypeptide"
  VARIANT (447)..(447): /replace=" "
  SITE (1)..(703): /note="Variant residues given in the sequence have no preference with respect to those in the annotations for variant positions"
EVQLVESGGGLVKPGGSLRLSCAASGFSFNAYAMNWVRQAPGKGLEWVGRIRTKNNNYATYYADSVKDRFTISRDDSKSTLYLQMNSLKTEDTAVYYCTTFYGNGVWGQGTTVTVSSASTKGPSVFPLAPSSKSTSGGTAALGCLVKDYFPEPVTVSWNSGALTSGVHTFPAVLQSSGLYSLSSVVTVPSSSLGTQTYICNVNHKPSNTKVDKRVEPKSCDKTHTCPPCPAPELLGGPSVFLFPPKPKDTLMISRTPEVTCVVVDVSHEDPEVKFNWYVDGVEVHNAKTKPREEQYNSTYRVVSVLTVLHQDWLNGKEYKCKVSNKALPAPIEKTISKAKGQPREPQVYTLPPCREEMTKNQVSLWCLVKGFYPSDIAVEWESNGQPENNYKTTPPVLDSDGSFFLYSKLTVDKSRWQQGNVFSCSVMHEALHNHYTQKSLSLSPGKGGGGSGGGGSGGGGSQVQLVQSGAEVKKPGSSVKVSCKASGGTFSSYAISWVRQAPGQGLEWMGGIIPIFGTANYAQKFQGRVTITADKSTSTAYMELSSLRSEDTAVYYCARGGYSYGSLDYWGQGTLVTVSSGGGGSGGGGSGGGGSDIQMTQSPSSLSASVGDRVTITCRASQSIISDLNWYQQKPGKAPKLLIHAASSLQSGVPSRFSGSGSGTDFTLTISSLQPEDFATYYCQQSYSTPYTFGQGTKLEIK

SEQ ID NO: 377 - protein, 365 aa, Artificial Sequence
  source: /note="Description of Artificial Sequence: Synthetic polypeptide"
QLVLTQPPSVSGAPGQRVTISCTGSSSNIGAGYDVHWYQQLPGTAPKLLIYGNSNRPSGVPDRFSGSKSGTSASLAITGLQAEDEADYYCQSYDSSLSEEVFGGGTKLTVLGQPKANPTVTLFPPSSEELQANKATLVCLISDFYPGAVTVAWKADGSPVKAGVETTKPSKQSNNKYAASSYLSLTPEQWKSHRSYSCQVTHEGSTVEKTVAPTECSGGGGSGGGGSGGGGSAPTSSSTKKTQLQLEHLLLDLQMILNGINNYKNPKLTRMLTFKFYMPKKATELKHLQCLEEELKPLEEVLNLAQSKNFHLRPRDLISNINVIVLELKGSETTFMCEYADETATIVEFLNRWITFCQSIISTLT

SEQ ID NO: 378 - protein, 350 aa, Artificial Sequence
  source: /note="Description of Artificial Sequence: Synthetic polypeptide"
QLVLTQPPSVSGAPGQRVTISCTGSSSNIGAGYDVHWYQQLPGTAPKLLIYGNSNRPSGVPDRFSGSKSGTSASLAITGLQAEDEADYYCQSYDSSLSEEVFGGGTKLTVLGQPKANPTVTLFPPSSEELQANKATLVCLISDFYPGAVTVAWKADGSPVKAGVETTKPSKQSNNKYAASSYLSLTPEQWKSHRSYSCQVTHEGSTVEKTVAPTECSAPTSSSTKKTQLQLEHLLLDLQMILNGINNYKNPKLTRMLTFKFYMPKKATELKHLQCLEEELKPLEEVLNLAQSKNFHLRPRDLISNINVIVLELKGSETTFMCEYADETATIVEFLNRWITFCQSIISTLT

SEQ ID NO: 379 - protein, 362 aa, Artificial Sequence
  source: /note="Description of Artificial Sequence: Synthetic polypeptide"
SLVLTQPPSVSVAPGKTARITCGGNNIGSKSVHWYQQKPGQAPVLVVYDDSDRPSGIPERFSGSNSGNTATLTISRVEAGDEADYYCQVWDSSSDHVVFGGGTQLTVLGQPKANPTVTLFPPSSEELQANKATLVCLISDFYPGAVTVAWKADGSPVKAGVETTKPSKQSNNKYAASSYLSLTPEQWKSHRSYSCQVTHEGSTVEKTVAPTECSGGGGSGGGGSGGGGSAPTSSSTKKTQLQLEHLLLDLQMILNGINNYKNPKLTRMLTFKFYMPKKATELKHLQCLEEELKPLEEVLNLAQSKNFHLRPRDLISNINVIVLELKGSETTFMCEYADETATIVEFLNRWITFCQSIISTLT

SEQ ID NO: 380 - protein, 347 aa, Artificial Sequence
  source: /note="Description of Artificial Sequence: Synthetic polypeptide"
SLVLTQPPSVSVAPGKTARITCGGNNIGSKSVHWYQQKPGQAPVLVVYDDSDRPSGIPERFSGSNSGNTATLTISRVEAGDEADYYCQVWDSSSDHVVFGGGTQLTVLGQPKANPTVTLFPPSSEELQANKATLVCLISDFYPGAVTVAWKADGSPVKAGVETTKPSKQSNNKYAASSYLSLTPEQWKSHRSYSCQVTHEGSTVEKTVAPTECSAPTSSSTKKTQLQLEHLLLDLQMILNGINNYKNPKLTRMLTFKFYMPKKATELKHLQCLEEELKPLEEVLNLAQSKNFHLRPRDLISNINVIVLELKGSETTFMCEYADETATIVEFLNRWITFCQSIISTLT

SEQ ID NO: 381 - protein, 367 aa, Artificial Sequence
  source: /note="Description of Artificial Sequence: Synthetic polypeptide"
DVVMTQSPLSLPVTLGQPASISCKSSQSLLDSDGKTFLNWLQQRPGQSPRRLIYLVSKLDSGVPDRFSGSGSGTDFTLKISRVEAEDVGVYYCWQGTHFPYTFGGGTKVEIKRTVAAPSVFIFPPSDEQLKSGTASVVCLLNNFYPREAKVQWKVDNALQSGNSQESVTEQDSKDSTYSLSSTLTLSKADYEKHKVYACEVTHQGLSSPVTKSFNRGECGGGGSGGGGSGGGGSAPTSSSTKKTQLQLEHLLLDLQMILNGINNYKNPKLTRMLTFKFYMPKKATELKHLQCLEEELKPLEEVLNLAQSKNFHLRPRDLISNINVIVLELKGSETTFMCEYADETATIVEFLNRWITFCQSIISTLT

SEQ ID NO: 382 - protein, 352 aa, Artificial Sequence
  source: /note="Description of Artificial Sequence: Synthetic polypeptide"
DVVMTQSPLSLPVTLGQPASISCKSSQSLLDSDGKTFLNWLQQRPGQSPRRLIYLVSKLDSGVPDRFSGSGSGTDFTLKISRVEAEDVGVYYCWQGTHFPYTFGGGTKVEIKRTVAAPSVFIFPPSDEQLKSGTASVVCLLNNFYPREAKVQWKVDNALQSGNSQESVTEQDSKDSTYSLSSTLTLSKADYEKHKVYACEVTHQGLSSPVTKSFNRGECAPTSSSTKKTQLQLEHLLLDLQMILNGINNYKNPKLTRMLTFKFYMPKKATELKHLQCLEEELKPLEEVLNLAQSKNFHLRPRDLISNINVIVLELKGSETTFMCEYADETATIVEFLNRWITFCQSIISTLT

SEQ ID NO: 383 - protein, 600 aa, Artificial Sequence
  source: /note="Description of Artificial Sequence: Synthetic polypeptide"
  VARIANT (449)..(449): /replace=" "
  SITE (1)..(600): /note="Variant residues given in the sequence have no preference with respect to those in the annotations for variant positions"
EVQLVESGGGLVQPGGSLRLSCAASGFTFSNDEMNWIRQAPGKGLEWVSYISSRSSTIYYADAVKGRFTISRDNARNSLYLQMNSLRAEDTAVYYCARGVDGDFSFDYWGQGTLVTVSSASTKGPSVFPLAPSSKSTSGGTAALGCLVKDYFPEPVTVSWNSGALTSGVHTFPAVLQSSGLYSLSSVVTVPSSSLGTQTYICNVNHKPSNTKVDKRVEPKSCDKTHTCPPCPAPELLGGPSVFLFPPKPKDTLMISRTPEVTCVVVDVSHEDPEVKFNWYVDGVEVHNAKTKPREEQYNSTYRVVSVLTVLHQDWLNGKEYKCKVSNKALPAPIEKTISKAKGQPREPQVCTLPPSREEMTKNQVSLSCAVKGFYPSDIAVEWESNGQPENNYKTTPPVLDSDGSFFLVSKLTVDKSRWQQGNVFSCSVMHEALHNHYTQKSLSLSPGKGGGGSGGGGSGGGGSIPPHVQKSVNNDMIVTDNNGAVKFPQLCKFCDVRFSTCDNQKSCMSNCSITSICEKPQEVCVAVWRKNDENITLETVCHDPKLPYHDFILEDAASPKCIMKEKKKPGETFFMCSCSSDECNDNIIFSEEYNTSNPD

SEQ ID NO: 384 - protein, 601 aa, Artificial Sequence
  source: /note="Description of Artificial Sequence: Synthetic polypeptide"
  VARIANT (450)..(450): /replace=" "
  SITE (1)..(601): /note="Variant residues given in the sequence have no preference with respect to those in the annotations for variant positions"
QVQLVQSGGGVVQPGRSLRLSCAASGFTFSSYAMHWVRQAPGKGLEWVAVISYDGSNKYYADSVKGRFTISRDNSKNTLYLQMNSLRAEDTAVYYCARELDYGDYGLDVWGKGTTVTVSSASTKGPSVFPLAPSSKSTSGGTAALGCLVKDYFPEPVTVSWNSGALTSGVHTFPAVLQSSGLYSLSSVVTVPSSSLGTQTYICNVNHKPSNTKVDKRVEPKSCDKTHTCPPCPAPELLGGPSVFLFPPKPKDTLMISRTPEVTCVVVDVSHEDPEVKFNWYVDGVEVHNAKTKPREEQYNSTYRVVSVLTVLHQDWLNGKEYKCKVSNKALPAPIEKTISKAKGQPREPQVCTLPPSREEMTKNQVSLSCAVKGFYPSDIAVEWESNGQPENNYKTTPPVLDSDGSFFLVSKLTVDKSRWQQGNVFSCSVMHEALHNHYTQKSLSLSPGKGGGGSGGGGSGGGGSIPPHVQKSVNNDMIVTDNNGAVKFPQLCKFCDVRFSTCDNQKSCMSNCSITSICEKPQEVCVAVWRKNDENITLETVCHDPKLPYHDFILEDAASPKCIMKEKKKPGETFFMCSCSSDECNDNIIFSEEYNTSNPD

SEQ ID NO: 385 - protein, 598 aa, Artificial Sequence
  source: /note="Description of Artificial Sequence: Synthetic polypeptide"
  VARIANT (447)..(447): /replace=" "
  SITE (1)..(598): /note="Variant residues given in the sequence have no preference with respect to those in the annotations for variant positions"
EVQLVESGGGLVKPGGSLRLSCAASGFSFNAYAMNWVRQAPGKGLEWVGRIRTKNNNYATYYADSVKDRFTISRDDSKSTLYLQMNSLKTEDTAVYYCTTFYGNGVWGQGTTVTVSSASTKGPSVFPLAPSSKSTSGGTAALGCLVKDYFPEPVTVSWNSGALTSGVHTFPAVLQSSGLYSLSSVVTVPSSSLGTQTYICNVNHKPSNTKVDKRVEPKSCDKTHTCPPCPAPELLGGPSVFLFPPKPKDTLMISRTPEVTCVVVDVSHEDPEVKFNWYVDGVEVHNAKTKPREEQYNSTYRVVSVLTVLHQDWLNGKEYKCKVSNKALPAPIEKTISKAKGQPREPQVYTLPPCREEMTKNQVSLWCLVKGFYPSDIAVEWESNGQPENNYKTTPPVLDSDGSFFLYSKLTVDKSRWQQGNVFSCSVMHEALHNHYTQKSLSLSPGKGGGGSGGGGSGGGGSIPPHVQKSVNNDMIVTDNNGAVKFPQLCKFCDVRFSTCDNQKSCMSNCSITSICEKPQEVCVAVWRKNDENITLETVCHDPKLPYHDFILEDAASPKCIMKEKKKPGETFFMCSCSSDECNDNIIFSEEYNTSNPD

SEQ ID NO: 386 - protein, 477 aa, Artificial Sequence
  source: /note="Description of Artificial Sequence: Synthetic polypeptide"
  VARIANT (477)..(477): /replace=" "
  SITE (1)..(477): /note="Variant residues given in the sequence have no preference with respect to those in the annotations for variant positions"
EVQLVESGGGLVQPGGSLRLSCAASGFTFSNDEMNWIRQAPGKGLEWVSYISSRSSTIYYADAVKGRFTISRDNARNSLYLQMNSLRAEDTAVYYCARGVDGDFSFDYWGQGTLVTVSSGGGGSGGGGSGGGGSQLVLTQPPSVSGAPGQRVTISCTGSSSNIGAGYDVHWYQQLPGTAPKLLIYGNSNRPSGVPDRFSGSKSGTSASLAITGLQAEDEADYYCQSYDSSLSEEVFGGGTKLTVLGGGGSDKTHTCPPCPAPELLGGPSVFLFPPKPKDTLMISRTPEVTCVVVDVSHEDPEVKFNWYVDGVEVHNAKTKPREEQYNSTYRVVSVLTVLHQDWLNGKEYKCKVSNKALPAPIEKTISKAKGQPREPQVCTLPPSREEMTKNQVSLSCAVKGFYPSDIAVEWESNGQPENNYKTTPPVLDSDGSFFLVSKLTVDKSRWQQGNVFSCSVMHEALHNHYTQKSLSLSPGK

SEQ ID NO: 387 - protein, 475 aa, Artificial Sequence
  source: /note="Description of Artificial Sequence: Synthetic polypeptide"
  VARIANT (475)..(475): /replace=" "
  SITE (1)..(475): /note="Variant residues given in the sequence have no preference with respect to those in the annotations for variant positions"
QVQLVQSGGGVVQPGRSLRLSCAASGFTFSSYAMHWVRQAPGKGLEWVAVISYDGSNKYYADSVKGRFTISRDNSKNTLYLQMNSLRAEDTAVYYCARELDYGDYGLDVWGKGTTVTVSSGGGGSGGGGSGGGGSSLVLTQPPSVSVAPGKTARITCGGNNIGSKSVHWYQQKPGQAPVLVVYDDSDRPSGIPERFSGSNSGNTATLTISRVEAGDEADYYCQVWDSSSDHVVFGGGTQLTVLGGGGSDKTHTCPPCPAPELLGGPSVFLFPPKPKDTLMISRTPEVTCVVVDVSHEDPEVKFNWYVDGVEVHNAKTKPREEQYNSTYRVVSVLTVLHQDWLNGKEYKCKVSNKALPAPIEKTISKAKGQPREPQVCTLPPSREEMTKNQVSLSCAVKGFYPSDIAVEWESNGQPENNYKTTPPVLDSDGSFFLVSKLTVDKSRWQQGNVFSCSVMHEALHNHYTQKSLSLSPGK

SEQ ID NO: 388 - protein, 628 aa, Artificial Sequence
  source: /note="Description of Artificial Sequence: Synthetic polypeptide"
  VARIANT (477)..(477): /replace=" "
  SITE (1)..(628): /note="Variant residues given in the sequence have no preference with respect to those in the annotations for variant positions"
EVQLVESGGGLVQPGGSLRLSCAASGFTFSNDEMNWIRQAPGKGLEWVSYISSRSSTIYYADAVKGRFTISRDNARNSLYLQMNSLRAEDTAVYYCARGVDGDFSFDYWGQGTLVTVSSGGGGSGGGGSGGGGSQLVLTQPPSVSGAPGQRVTISCTGSSSNIGAGYDVHWYQQLPGTAPKLLIYGNSNRPSGVPDRFSGSKSGTSASLAITGLQAEDEADYYCQSYDSSLSEEVFGGGTKLTVLGGGGSDKTHTCPPCPAPELLGGPSVFLFPPKPKDTLMISRTPEVTCVVVDVSHEDPEVKFNWYVDGVEVHNAKTKPREEQYNSTYRVVSVLTVLHQDWLNGKEYKCKVSNKALPAPIEKTISKAKGQPREPQVCTLPPSREEMTKNQVSLSCAVKGFYPSDIAVEWESNGQPENNYKTTPPVLDSDGSFFLVSKLTVDKSRWQQGNVFSCSVMHEALHNHYTQKSLSLSPGKGGGGSGGGGSGGGGSIPPHVQKSVNNDMIVTDNNGAVKFPQLCKFCDVRFSTCDNQKSCMSNCSITSICEKPQEVCVAVWRKNDENITLETVCHDPKLPYHDFILEDAASPKCIMKEKKKPGETFFMCSCSSDECNDNIIFSEEYNTSNPD

SEQ ID NO: 389 - protein, 626 aa, Artificial Sequence
  source: /note="Description of Artificial Sequence: Synthetic polypeptide"
  VARIANT (475)..(475): /replace=" "
  SITE (1)..(626): /note="Variant residues given in the sequence have no preference with respect to those in the annotations for variant positions"
QVQLVQSGGGVVQPGRSLRLSCAASGFTFSSYAMHWVRQAPGKGLEWVAVISYDGSNKYYADSVKGRFTISRDNSKNTLYLQMNSLRAEDTAVYYCARELDYGDYGLDVWGKGTTVTVSSGGGGSGGGGSGGGGSSLVLTQPPSVSVAPGKTARITCGGNNIGSKSVHWYQQKPGQAPVLVVYDDSDRPSGIPERFSGSNSGNTATLTISRVEAGDEADYYCQVWDSSSDHVVFGGGTQLTVLGGGGSDKTHTCPPCPAPELLGGPSVFLFPPKPKDTLMISRTPEVTCVVVDVSHEDPEVKFNWYVDGVEVHNAKTKPREEQYNSTYRVVSVLTVLHQDWLNGKEYKCKVSNKALPAPIEKTISKAKGQPREPQVCTLPPSREEMTKNQVSLSCAVKGFYPSDIAVEWESNGQPENNYKTTPPVLDSDGSFFLVSKLTVDKSRWQQGNVFSCSVMHEALHNHYTQKSLSLSPGKGGGGSGGGGSGGGGSIPPHVQKSVNNDMIVTDNNGAVKFPQLCKFCDVRFSTCDNQKSCMSNCSITSICEKPQEVCVAVWRKNDENITLETVCHDPKLPYHDFILEDAASPKCIMKEKKKPGETFFMCSCSSDECNDNIIFSEEYNTSNPD

SEQ ID NO: 390 - protein, 481 aa, Artificial Sequence; identical to SEQ ID NO: 196
  source: /note="Description of Artificial Sequence: Synthetic polypeptide"
  VARIANT (481)..(481): /replace=" "
  SITE (1)..(481): /note="Variant residues given in the sequence have no preference with respect to those in the annotations for variant positions"

SEQ ID NO: 391 - protein, 257 aa, Artificial Sequence; identical to SEQ ID NO: 198
  source: /note="Description of Artificial Sequence: Synthetic polypeptide"

SEQ ID NO: 392 - protein, 707 aa, Artificial Sequence
  source: /note="Description of Artificial Sequence: Synthetic polypeptide"
  VARIANT (447)..(447): /replace=" "
  SITE (1)..(707): /note="Variant residues given in the sequence have no preference with respect to those in the annotations for variant positions"
EVQLVESGGGLVKPGGSLRLSCAASGFSFNAYAMNWVRQAPGKGLEWVGRIRTKNNNYATYYADSVKDRFTISRDDSKSTLYLQMNSLKTEDTAVYYCTTFYGNGVWGQGTTVTVSSASTKGPSVFPLAPSSKSTSGGTAALGCLVKDYFPEPVTVSWNSGALTSGVHTFPAVLQSSGLYSLSSVVTVPSSSLGTQTYICNVNHKPSNTKVDKRVEPKSCDKTHTCPPCPAPELLGGPSVFLFPPKPKDTLMISRTPEVTCVVVDVSHEDPEVKFNWYVDGVEVHNAKTKPREEQYNSTYRVVSVLTVLHQDWLNGKEYKCKVSNKALPAPIEKTISKAKGQPREPQVYTLPPCREEMTKNQVSLWCLVKGFYPSDIAVEWESNGQPENNYKTTPPVLDSDGSFFLYSKLTVDKSRWQQGNVFSCSVMHEALHNHYTQKSLSLSPGKGGGGSGGGGSGGGGSEVQLVESGGGLVQPGGSLRLSCAASGFTFSNDEMNWIRQAPGKGLEWVSYISSRSSTIYYADAVKGRFTISRDNARNSLYLQMNSLRAEDTAVYYCARGVDGDFSFDYWGQGTLVTVSSGGGGSGGGGSGGGGSQLVLTQPPSVSGAPGQRVTISCTGSSSNIGAGYDVHWYQQLPGTAPKLLIYGNSNRPSGVPDRFSGSKSGTSASLAITGLQAEDEADYYCQSYDSSLSEEVFGGGTKLTVL

SEQ ID NO: 393 - protein, 705 aa, Artificial Sequence
  source: /note="Description of Artificial Sequence: Synthetic polypeptide"
  VARIANT (447)..(447): /replace=" "
  SITE (1)..(705): /note="Variant residues given in the sequence have no preference with respect to those in the annotations for variant positions"
EVQLVESGGGLVQPGGSLRLSCAASGFSFNAYAMNWVRQAPGKGLEWVGRIRTKNNNYATYYADSVKDRFTISRDDSKSSLYLQMNSLKTEDTAVYYCATFYGNGVWGQGTTVTVSSASTKGPSVFPLAPSSKSTSGGTAALGCLVKDYFPEPVTVSWNSGALTSGVHTFPAVLQSSGLYSLSSVVTVPSSSLGTQTYICNVNHKPSNTKVDKRVEPKSCDKTHTCPPCPAPELLGGPSVFLFPPKPKDTLMISRTPEVTCVVVDVSHEDPEVKFNWYVDGVEVHNAKTKPREEQYNSTYRVVSVLTVLHQDWLNGKEYKCKVSNKALPAPIEKTISKAKGQPREPQVYTLPPCREEMTKNQVSLWCLVKGFYPSDIAVEWESNGQPENNYKTTPPVLDSDGSFFLYSKLTVDKSRWQQGNVFSCSVMHEALHNHYTQKSLSLSPGKGGGGSGGGGSGGGGSQVQLVQSGGGVVQPGRSLRLSCAASGFTFSSYAMHWVRQAPGKGLEWVAVISYDGSNKYYADSVKGRFTISRDNSKNTLYLQMNSLRAEDTAVYYCARELDYGDYGLDVWGKGTTVTVSSGGGGSGGGGSGGGGSSLVLTQPPSVSVAPGKTARITCGGNNIGSKSVHWYQQKPGQAPVLVVYDDSDRPSGIPERFSGSNSGNTATLTISRVEAGDEADYYCQVWDSSSDHVVFGGGTQLTVL

SEQ ID NO: 394 - DNA, 30 bp, Artificial Sequence
  source: /note="Description of Artificial Sequence: Synthetic oligonucleotide"
ggcggcggaggatctggcggaggcggatct

SEQ ID NO: 395 - DNA, 681 bp, Artificial Sequence
  source: /note="Description of Artificial Sequence: Synthetic polynucleotide"
gacaagacccatacctgtcctccatgtcctgctccagagctgctcggaggcccttccgtgtttctgttccctccaaagcctaaggacaccctgatgatctctcggacccctgaagtgacctgcgtggtggtggatgtgtctcacgaggatcccgaagtgaagttcaattggtacgtggacggcgtggaagtgcacaacgccaagaccaagcctagagaggaacagtacaactccacctacagagtggtgtccgtgctgaccgtgctgcaccaggattggctgaacggcaaagagtacaagtgcaaggtgtccaacaaggccctgcctgctcctatcgaaaagaccatctccaaggccaagggccagcctagggaaccccaggtttacaccctgcctccatgccgggaagagatgaccaagaaccaggtgtccctgtggtgcctggtcaagggcttctacccttccgatatcgccgtggaatgggagagcaatggccagcctgagaacaactacaagaccacacctcctgtgctggactccgacggctcattcttcctgtactccaagctgacagtggacaagtccagatggcagcagggcaacgtgttctcctgctccgtgatgcacgaggccctgcacaacagattcacccagaagtccctgtctctgtcccctggaaaa

SEQ ID NO: 396 - DNA, 24 bp, Artificial Sequence
  source: /note="Description of Artificial Sequence: Synthetic oligonucleotide"
caccatcaccatcatcaccaccac

SEQ ID NO: 397 - DNA, 795 bp, Artificial Sequence
  source: /note="Description of Artificial Sequence: Synthetic polynucleotide"
atggaaaccgacacactgctgctgtgggtgctgctcttgtgggtgccaggatctacaggagacaagacccatacctgtcctccatgtcctgctccagagctgctcggaggcccttccgtgtttctgttccctccaaagcctaaggacaccctgatgatctctcggacccctgaagtgacctgcgtggtggtggatgtgtctcacgaggatcccgaagtgaagttcaattggtacgtggacggcgtggaagtgcacaacgccaagaccaagcctagagaggaacagtacaactccacctacagagtggtgtccgtgctgaccgtgctgcaccaggattggctgaacggcaaagagtacaagtgcaaggtgtccaacaaggccctgcctgctcctatcgaaaagaccatctccaaggccaagggccagcctagggaaccccaggtttacaccctgcctccatgccgggaagagatgaccaagaaccaggtgtccctgtggtgcctggtcaagggcttctacccttccgatatcgccgtggaatgggagagcaatggccagcctgagaacaactacaagaccacacctcctgtgctggactccgacggctcattcttcctgtactccaagctgacagtggacaagtccagatggcagcagggcaacgtgttctcctgctccgtgatgcacgaggccctgcacaacagattcacccagaagtccctgtctctgtcccctggaaaaggcggcggaggatctggcggaggcggatctcaccatcaccatcatcaccaccac

SEQ ID NO: 398 - protein, 10 aa, Artificial Sequence
  source: /note="Description of Artificial Sequence: Synthetic peptide"
GGGGSGGGGS

SEQ ID NO: 399 - protein, 227 aa, Artificial Sequence
  source: /note="Description of Artificial Sequence: Synthetic polypeptide"
DKTHTCPPCPAPELLGGPSVFLFPPKPKDTLMISRTPEVTCVVVDVSHEDPEVKFNWYVDGVEVHNAKTKPREEQYNSTYRVVSVLTVLHQDWLNGKEYKCKVSNKALPAPIEKTISKAKGQPREPQVYTLPPCREEMTKNQVSLWCLVKGFYPSDIAVEWESNGQPENNYKTTPPVLDSDGSFFLYSKLTVDKSRWQQGNVFSCSVMHEALHNRFTQKSLSLSPGK

SEQ ID NO: 400 - protein, 8 aa, Artificial Sequence
  source: /note="Description of Artificial Sequence: Synthetic peptide"
HHHHHHHH

SEQ ID NO: 401 - protein, 245 aa, Artificial Sequence
  source: /note="Description of Artificial Sequence: Synthetic polypeptide"
DKTHTCPPCPAPELLGGPSVFLFPPKPKDTLMISRTPEVTCVVVDVSHEDPEVKFNWYVDGVEVHNAKTKPREEQYNSTYRVVSVLTVLHQDWLNGKEYKCKVSNKALPAPIEKTISKAKGQPREPQVYTLPPCREEMTKNQVSLWCLVKGFYPSDIAVEWESNGQPENNYKTTPPVLDSDGSFFLYSKLTVDKSRWQQGNVFSCSVMHEALHNRFTQKSLSLSPGKGGGGSGGGGSHHHHHHHH

SEQ ID NO: 402 - protein, 10 aa, Artificial Sequence
  source: /note="Description of Artificial Sequence: Synthetic peptide"
GFTFSNDEMN

SEQ ID NO: 403 - protein, 10 aa, Artificial Sequence
  source: /note="Description of Artificial Sequence: Synthetic peptide"
GFTFSSYAMH

SEQ ID NO: 404 - protein, 17 aa, Artificial Sequence
  source: /note="Description of Artificial Sequence: Synthetic peptide"
YISSRSSTIYYADAVKG

SEQ ID NO: 405 - protein, 17 aa, Artificial Sequence
  source: /note="Description of Artificial Sequence: Synthetic peptide"
YISSGSSTIYYADAVKG

SEQ ID NO: 406 - protein, 17 aa, Artificial Sequence
  source: /note="Description of Artificial Sequence: Synthetic peptide"
FISGGSSTIYYADAVKG

SEQ ID NO: 407 - protein, 17 aa, Artificial Sequence
  source: /note="Description of Artificial Sequence: Synthetic peptide"
YITSKSSTIYYADSVKG

SEQ ID NO: 408 - protein, 17 aa, Artificial Sequence
  source: /note="Description of Artificial Sequence: Synthetic peptide"
YITSKSSTIYYADAVKG

SEQ ID NO: 409 - protein, 17 aa, Artificial Sequence
  source: /note="Description of Artificial Sequence: Synthetic peptide"
YISSSSSTIYYADAVTG

SEQ ID NO: 410 - protein, 17 aa, Artificial Sequence
  source: /note="Description of Artificial Sequence: Synthetic peptide"
VISYDGSNKYYADSVKG

SEQ ID NO: 411 - protein, 17 aa, Artificial Sequence
  source: /note="Description of Artificial Sequence: Synthetic peptide"
VIPYYGSNKYYADSVKG

SEQ ID NO: 412 - protein, 17 aa, Artificial Sequence
  source: /note="Description of Artificial Sequence: Synthetic peptide"
VISYDGSDKYYADSVKG

SEQ ID NO: 413 - protein, 10 aa, Artificial Sequence
  source: /note="Description of Artificial Sequence: Synthetic peptide"
GVDGDFSFDY

SEQ ID NO: 414 - protein, 10 aa, Artificial Sequence
  source: /note="Description of Artificial Sequence: Synthetic peptide"
NSDEDGSFDY

SEQ ID NO: 415 - protein, 10 aa, Artificial Sequence
  source: /note="Description of Artificial Sequence: Synthetic peptide"
GVDGDFSFDV

SEQ ID NO: 416 - protein, 10 aa, Artificial Sequence
  source: /note="Description of Artificial Sequence: Synthetic peptide"
SVDGDGSFDY

SEQ ID NO: 417 - protein, 10 aa, Artificial Sequence
  source: /note="Description of Artificial Sequence: Synthetic peptide"
SSDGSTSFDY

SEQ ID NO: 418 - protein, 10 aa, Artificial Sequence
  source: /note="Description of Artificial Sequence: Synthetic peptide"
NSDSDGSFDI

SEQ ID NO: 419 - protein, 10 aa, Artificial Sequence
  source: /note="Description of Artificial Sequence: Synthetic peptide"
GVDGDFSFDF

SEQ ID NO: 420 - protein, 10 aa, Artificial Sequence
  source: /note="Description of Artificial Sequence: Synthetic peptide"
SGRLDGSFDY

SEQ ID NO: 421 - protein, 10 aa, Artificial Sequence
  source: /note="Description of Artificial Sequence: Synthetic peptide"
GVESDFSFDY

SEQ ID NO: 422 - protein, 11 aa, Artificial Sequence
  source: /note="Description of Artificial Sequence: Synthetic peptide"
ELDYGDYGLDV

SEQ ID NO: 423 - protein, 11 aa, Artificial Sequence
  source: /note="Description of Artificial Sequence: Synthetic peptide"
ELDYGDWGLDV

SEQ ID NO: 424 - protein, 25 aa, Artificial Sequence [sequence omitted]

SEQ ID NO: 425 - protein, 25 aa, Artificial Sequence
  source: /note="Description of Artificial Sequence: Synthetic peptide"
QVQLVQSGGGVVQPGRSLRLSCAAS

SEQ ID NO: 426 - protein, 14 aa, Artificial Sequence
  source: /note="Description of Artificial Sequence: Synthetic peptide"
WIRQAPGKGLEWVS

SEQ ID NO: 427 - protein, 14 aa, Artificial Sequence
  source: /note="Description of Artificial Sequence: Synthetic peptide"
WVRQAPGKGLEWVA

SEQ ID NO: 428 - protein, 32 aa, Artificial Sequence
  source: /note="Description of Artificial Sequence: Synthetic polypeptide"
RFTISRDNARNSLYLQMNSLRAEDTAVYYCAR

SEQ ID NO: 429 - protein, 32 aa, Artificial Sequence
  source: /note="Description of Artificial Sequence: Synthetic polypeptide"
RFTISRDNSKNTLYLQMNSLRAEDTAVYYCAR

SEQ ID NO: 430 - protein, 11 aa, Artificial Sequence
  source: /note="Description of Artificial Sequence: Synthetic peptide"
WGQGTLVTVSS

SEQ ID NO: 431 - protein, 11 aa, Artificial Sequence
  source: /note="Description of Artificial Sequence: Synthetic peptide"
WGKGTTVTVSS

SEQ ID NO: 432 - protein, 14 aa, Artificial Sequence
  source: /note="Description of Artificial Sequence: Synthetic peptide"
TGSSSNIGAGYDVH

SEQ ID NO: 433 - protein, 11 aa, Artificial Sequence
  source: /note="Description of Artificial Sequence: Synthetic peptide"
GGNNIGSKSVH

SEQ ID NO: 434 - protein, 7 aa, Artificial Sequence
  source: /note="Description of Artificial Sequence: Synthetic peptide"
GNSNRPS

SEQ ID NO: 435 - protein, 7 aa, Artificial Sequence
  source: /note="Description of Artificial Sequence: Synthetic peptide"
DDSDRPS

SEQ ID NO: 436 - protein, 11 aa, Artificial Sequence
  source: /note="Description of Artificial Sequence: Synthetic peptide"
QSYDSSLSEEV

SEQ ID NO: 437 - protein, 11 aa, Artificial Sequence
  source: /note="Description of Artificial Sequence: Synthetic peptide"
QVWDSSSDHVV

SEQ ID NO: 438 - protein, 22 aa, Artificial Sequence
  source: /note="Description of Artificial Sequence: Synthetic peptide"
QLVLTQPPSVSGAPGQRVTISC

SEQ ID NO: 439 - protein, 22 aa, Artificial Sequence
  source: /note="Description of Artificial Sequence: Synthetic peptide"
SLVLTQPPSVSVAPGKTARITC

SEQ ID NO: 440 - protein, 15 aa, Artificial Sequence
  source: /note="Description of Artificial Sequence: Synthetic peptide"
WYQQLPGTAPKLLIY

SEQ ID NO: 441 - protein, 15 aa, Artificial Sequence
  source: /note="Description of Artificial Sequence: Synthetic peptide"
WYQQKPGQAPVLVVY

SEQ ID NO: 442 - protein, 32 aa, Artificial Sequence
  source: /note="Description of Artificial Sequence: Synthetic polypeptide"
GVPDRFSGSKSGTSASLAITGLQAEDEADYYC

SEQ ID NO: 443 - protein, 32 aa, Artificial Sequence
  source: /note="Description of Artificial Sequence: Synthetic polypeptide"
GIPERFSGSNSGNTATLTISRVEAGDEADYYC

SEQ ID NO: 444 - protein, 10 aa, Artificial Sequence
  source: /note="Description of Artificial Sequence: Synthetic peptide"
FGGGTKLTVL

SEQ ID NO: 445 - protein, 10 aa, Artificial Sequence
  source: /note="Description of Artificial Sequence: Synthetic peptide"
FGGGTQLTVL

SEQ ID NO: 446 - protein, 10 aa, Artificial Sequence
  source: /note="Description of Artificial Sequence: Synthetic peptide"
GFSFNAYAMN

SEQ ID NO: 447 - protein, 19 aa, Artificial Sequence
  source: /note="Description of Artificial Sequence: Synthetic peptide"
RIRTKNNNYATYYADSVKD

SEQ ID NO: 448 - protein, 6 aa, Artificial Sequence
  source: /note="Description of Artificial Sequence: Synthetic peptide"
FYGNGV

SEQ ID NO: 449 - protein, 25 aa, Artificial Sequence
  source: /note="Description of Artificial Sequence: Synthetic peptide"
EVQLVESGGGLVKPGGSLRLSCAAS

SEQ ID NO: 450 - protein, 14 aa, Artificial Sequence
  source: /note="Description of Artificial Sequence: Synthetic peptide"
WVRQAPGKGLEWVG

SEQ ID NO: 451 - protein, 32 aa, Artificial Sequence
  source: /note="Description of Artificial Sequence: Synthetic polypeptide"
RFTISRDDSKSTLYLQMNSLKTEDTAVYYCTT

SEQ ID NO: 452 - protein, 32 aa, Artificial Sequence
  source: /note="Description of Artificial Sequence: Synthetic polypeptide"
RFTISRDDSKSSLYLQMNSLKTEDTAVYYCAT

SEQ ID NO: 453 - protein, 11 aa, Artificial Sequence
  source: /note="Description of Artificial Sequence: Synthetic peptide"
WGQGTTVTVSS

SEQ ID NO: 454 - protein, 16 aa, Artificial Sequence
  source: /note="Description of Artificial Sequence: Synthetic peptide"
KSSQSLLDSDGKTFLN

SEQ ID NO: 455 - protein, 7 aa, Artificial Sequence
  source: /note="Description of Artificial Sequence: Synthetic peptide"
LVSKLDS

SEQ ID NO: 456 - protein, 9 aa, Artificial Sequence
  source: /note="Description of Artificial Sequence: Synthetic peptide"
WQGTHFPYT

SEQ ID NO: 457 - protein, 23 aa, Artificial Sequence
  source: /note="Description of Artificial Sequence: Synthetic peptide"
DVVMTQSPLSLPVTLGQPASISC

SEQ ID NO: 458 - protein, 15 aa, Artificial Sequence
  source: /note="Description of Artificial Sequence: Synthetic peptide"
WLQQRPGQSPRRLIY

SEQ ID NO: 459 - protein, 32 aa, Artificial Sequence
  source: /note="Description of Artificial Sequence: Synthetic polypeptide"
GVPDRFSGSGSGTDFTLKISRVEAEDVGVYYC

SEQ ID NO: 460 - protein, 10 aa, Artificial Sequence
  source: /note="Description of Artificial Sequence: Synthetic peptide"
FGGGTKVEIK

SEQ ID NO: 461 - protein, 10 aa, Artificial Sequence
  source: /note="Description of Artificial Sequence: Synthetic peptide"
GGTFSSYAIS

SEQ ID NO: 462 - protein, 17 aa, Artificial Sequence
  source: /note="Description of Artificial Sequence: Synthetic peptide"
GIIPIFGTANYAQKFQG

SEQ ID NO: 463 - protein, 10 aa, Artificial Sequence
  source: /note="Description of Artificial Sequence: Synthetic peptide"
GGYSYGSLDY

SEQ ID NO: 464 - protein, 25 aa, Artificial Sequence [sequence omitted]

SEQ ID NO: 465 - protein, 14 aa, Artificial Sequence
  source: /note="Description of Artificial Sequence: Synthetic peptide"
WVRQAPGQGLEWMG

SEQ ID NO: 466 - protein, 32 aa, Artificial Sequence
  source: /note="Description of Artificial Sequence: Synthetic polypeptide"
RVTITADKSTSTAYMELSSLRSEDTAVYYCAR

SEQ ID NO: 467 - protein, 11 aa, Artificial Sequence
  source: /note="Description of Artificial Sequence: Synthetic peptide"
RASQSIISDLN

SEQ ID NO: 468 - protein, 7 aa, Artificial Sequence
  source: /note="Description of Artificial Sequence: Synthetic peptide"
AASSLQS

SEQ ID NO: 469 - protein, 9 aa, Artificial Sequence
  source: /note="Description of Artificial Sequence: Synthetic peptide"
QQSYSTPYT

SEQ ID NO: 470 - protein, 23 aa, Artificial Sequence
  source: /note="Description of Artificial Sequence: Synthetic peptide"
DIQMTQSPSSLSASVGDRVTITC

SEQ ID NO: 471 - protein, 15 aa, Artificial Sequence
  source: /note="Description of Artificial Sequence: Synthetic peptide"
WYQQKPGKAPKLLIH

SEQ ID NO: 472 - protein, 32 aa, Artificial Sequence
  source: /note="Description of Artificial Sequence: Synthetic polypeptide"
GVPSRFSGSGSGTDFTLTISSLQPEDFATYYC

SEQ ID NO: 473 - protein, 10 aa, Artificial Sequence
  source: /note="Description of Artificial Sequence: Synthetic peptide"
FGQGTKLEIK

SEQ ID NO: 474 - protein, 17 aa, Artificial Sequence
  source: /note="Description of Artificial Sequence: Synthetic peptide"
  VARIANT (1)..(1): /replace="Phe"
  VARIANT (3)..(3): /replace="Thr"
  VARIANT (4)..(4): /replace="Gly"
  VARIANT (5)..(5): /replace="Lys" or "Gly" or "Ser"
  VARIANT (14)..(14): /replace="Ser"
  VARIANT (16)..(16): /replace="Thr"
  SITE (1)..(17): /note="Variant residues given in the sequence have no preference with respect to those in the annotations for variant positions"
YISSRSSTIYYADAVKG

SEQ ID NO: 475 - protein, 10 aa, Artificial Sequence
  source: /note="Description of Artificial Sequence: Synthetic peptide"
  VARIANT (1)..(1): /replace="Asn" or "Ser"
  VARIANT (2)..(2): /replace="Ser" or "Gly"
  VARIANT (3)..(3): /replace="Glu" or "Arg"
  VARIANT (4)..(4): /replace="Ser" or "Glu" or "Leu"
  VARIANT (5)..(5): /replace="Ser"
  VARIANT (6)..(6): /replace="Gly" or "Thr"
  VARIANT (10)..(10): /replace="Val" or "Phe" or "Ile"
  SITE (1)..(10): /note="Variant residues given in the sequence have no preference with respect to those in the annotations for variant positions"
GVDGDFSFDY

SEQ ID NO: 476 - protein, 17 aa, Artificial Sequence
  source: /note="Description of Artificial Sequence: Synthetic peptide"
  VARIANT (1)..(1): /replace="Phe"
  VARIANT (4)..(4): /replace="Gly"
  VARIANT (5)..(5): /replace="Arg"
  SITE (1)..(17): /note="Variant residues given in the sequence have no preference with respect to those in the annotations for variant positions"
YISSGSSTIYYADAVKG

SEQ ID NO: 477 - protein, 10 aa, Artificial Sequence
  source: /note="Description of Artificial Sequence: Synthetic peptide"
  VARIANT (1)..(1): /replace="Asn"
  VARIANT (2)..(2): /replace="Ser"
  VARIANT (4)..(4): /replace="Glu"
  VARIANT (6)..(6): /replace="Gly"
  SITE (1)..(10): /note="Variant residues given in the sequence have no preference with respect to those in the annotations for variant positions"
GVDGDFSFDY

SEQ ID NO: 478 - protein, 17 aa, Artificial Sequence
  source: /note="Description of Artificial Sequence: Synthetic peptide"
  VARIANT (3)..(3): /replace="Pro"
  VARIANT (5)..(5): /replace="Tyr"
  VARIANT (8)..(8): /replace="Asp"
  SITE (1)..(17): /note="Variant residues given in the sequence have no preference with respect to those in the annotations for variant positions"
VISYDGSNKYYADSVKG

SEQ ID NO: 479 - protein, 11 aa, Artificial Sequence
  source: /note="Description of Artificial Sequence: Synthetic peptide"
  VARIANT (7)..(7): /replace="Trp"
  SITE (1)..(11): /note="Variant residues given in the sequence have no preference with respect to those in the annotations for variant positions"
ELDYGDYGLDV

SEQ ID NO: 480 - protein, 117 aa, Artificial Sequence
  source: /note="Description of Artificial Sequence: Synthetic polypeptide"
EVQLVESGGGLVKPGGSLRLSCAASGFSFNAYAMNWVRQAPGKGLEWVGRIRTKNNNYATYYADSVKDRFTISRDDSKNTLYLQMNSLKTEDTAVYYCTTFYGNGVWGQGTLVTVSS

SEQ ID NO: 481 - protein, 112 aa, Artificial Sequence
  source: /note="Description of Artificial Sequence: Synthetic polypeptide"
DVVMTQSPLSLPVTLGQPASISCKSSQSLLDSDGKTFLNWLLQRPGQSPRRLIYLVSKLDSGVPDRFSGSGSGTDFTLKISRVEAEDVGVYYCWQGTHFPYTFGGGTRLEIK

We claim:

1.-81. (canceled)

82. A multispecific molecule comprising:
(i) an anti-CSF1R binding moiety;
(ii) an anti-CCR2 binding moiety; and
(iii) a TGF-beta inhibitor,
wherein the anti-CSF1R binding moiety is an anti-CSF1R antibody molecule or antigen-binding fragment thereof, and the anti-CCR2 binding moiety is an anti-CCR2 antibody molecule or antigen-binding fragment thereof.

83. The multispecific molecule of claim 82, wherein the anti-CSF1R binding moiety comprises:
(a) a heavy chain variable region (VH) comprising a heavy chain complementarity determining region 1 (HCDR1), a HCDR2, and a HCDR3, and a light chain variable region (VL) comprising a light chain complementarity determining region 1 (LCDR1), a LCDR2, and a LCDR3,
wherein the HCDR1, the HCDR2, the HCDR3, the LCDR1, the LCDR2, and the LCDR3 comprise the amino acid sequences of:
SEQ ID NOs: 402, 474, 475, 432, 434, and 436, respectively;
SEQ ID NOs: 402, 405, 413, 432, 434, and 436, respectively;
SEQ ID NOs: 402, 404, 413, 432, 434, and 436, respectively;
SEQ ID NOs: 402, 406, 413, 432, 434, and 436, respectively;
SEQ ID NOs: 402, 404, 414, 432, 434, and 436, respectively;
SEQ ID NOs: 402, 407, 413, 432, 434, and 436, respectively;
SEQ ID NOs: 402, 404, 415, 432, 434, and 436, respectively;
SEQ ID NOs: 402, 408, 413, 432, 434, and 436, respectively;
SEQ ID NOs: 402, 404, 416, 432, 434, and 436, respectively;
SEQ ID NOs: 402, 404, 417, 432, 434, and 436, respectively;
SEQ ID NOs: 402, 409, 413, 432, 434, and 436, respectively;
SEQ ID NOs: 402, 404, 418, 432, 434, and 436, respectively;
SEQ ID NOs: 402, 404, 419, 432, 434, and 436, respectively;
SEQ ID NOs: 402, 404, 420, 432, 434, and 436, respectively;
SEQ ID NOs: 402, 404, 421, 432, 434, and 436, respectively;
SEQ ID NOs: 403, 478, 479, 433, 435, and 437, respectively;
SEQ ID NOs: 403, 411, 422, 433, 435, and 437, respectively;
SEQ ID NOs: 403, 410, 422, 433, 435, and 437, respectively;
SEQ ID NOs: 403, 410, 423, 433, 435, and 437, respectively; or
SEQ ID NOs: 403, 412, 422, 433, 435, and 437, respectively; or
(b) a VH comprising the HCDR1, the HCDR2, and the HCDR3 of SEQ ID NOs: 402, 476, and 477, respectively.

84. The multispecific molecule of claim 82, wherein the anti-CSF1R binding moiety comprises:
(a) a VH comprising an amino acid sequence having at least 80% sequence identity to any one sequence selected from the group consisting of SEQ ID NOs: 323-336 and 339, or an amino acid sequence having at least 90% sequence identity to any one sequence selected from the group consisting of SEQ ID NOs: 337, 338, and 340;
(b) a VH comprising an amino acid sequence encoded by a nucleotide sequence having at least 80% sequence identity to the sequence of SEQ ID NO: 129 or SEQ ID NO: 138;
(c) a VL comprising an amino acid sequence having at least 80% sequence identity to the amino acid sequence of SEQ ID NO: 341 or SEQ ID NO: 139, or an amino acid sequence having at least 90% sequence identity to the sequence of SEQ ID NO: 342;
(d) a VL comprising an amino acid sequence encoded by a nucleotide sequence having at least 80% sequence identity to the sequence of SEQ ID NO: 130 or SEQ ID NO: 140; or
(e) a VH and a VL comprising the amino acid sequences of:
SEQ ID NOs: 324 and 341, respectively;
SEQ ID NOs: 323 and 341, respectively;
SEQ ID NOs: 325 and 341, respectively;
SEQ ID NOs: 326 and 341, respectively;
SEQ ID NOs: 327 and 341, respectively;
SEQ ID NOs: 328 and 341, respectively;
SEQ ID NOs: 329 and 341, respectively;
SEQ ID NOs: 330 and 341, respectively;
SEQ ID NOs: 331 and 341, respectively;
SEQ ID NOs: 332 and 341, respectively;
SEQ ID NOs: 333 and 341, respectively;
SEQ ID NOs: 334 and 341, respectively;
SEQ ID NOs: 335 and 341, respectively;
SEQ ID NOs: 336 and 341, respectively;
SEQ ID NOs: 337 and 342, respectively;
SEQ ID NOs: 338 and 342, respectively;
SEQ ID NOs: 339 and 139, respectively;
SEQ ID NOs: 339 and 342, respectively; or
SEQ ID NOs: 340 and 342, respectively.

85. The multispecific molecule of claim 82, wherein the anti-CSF1R binding moiety comprises:
(a) (i) a VH comprising a HCDR1, a HCDR2, and a HCDR3 of SEQ ID NOs: 402, 405, and 413, respectively, and a VL comprising a LCDR1, a LCDR2, and a LCDR3 of SEQ ID NOs: 432, 434, and 436, respectively; or
(ii) a VH comprising a HCDR1, a HCDR2, and a HCDR3 of SEQ ID NOs: 402, 407, 413, respectively, and a VL comprising a LCDR1, a LCDR2, and a LCDR3 of SEQ ID NOs: 433, 435, 437, respectively; or
(b) (i) a VH comprising an amino acid sequence of SEQ ID NO: 323, and a VL comprising an amino acid sequence of SEQ ID NO: 341; or
(ii) a VH comprising an amino acid sequence of SEQ ID NO: 327, and a VL comprising an amino acid sequence of SEQ ID NO: 342.

86. The multispecific molecule of claim 82, wherein the anti-CCR2 binding moiety comprises:
(a) a VH comprising a HCDR1, a HCDR2, and a HCDR3, and a VL comprising a LCDR1, a LCDR2, and a LCDR3,
wherein the HCDR1, the HCDR2, the HCDR3, the LCDR1, the LCDR2, and the LCDR3 comprise the amino acid sequences of SEQ ID NOs: 446, 447, 448, 454, 455, and 456, respectively; or
(b) (i) a VH comprising an amino acid sequence having at least 90% sequence identity to the amino acid sequence of SEQ ID NO: 343 or SEQ ID NO: 344; or an amino acid sequence encoded by a nucleotide sequence having at least 80% sequence identity to the sequence of SEQ ID NO: 133;
(ii) a VL comprising an amino acid sequence having at least 90% sequence identity to the amino acid sequence of SEQ ID NO: 345; or an amino acid sequence encoded by a nucleotide sequence having at least 80% sequence identity to the sequence of SEQ ID NOs: 272; or
(iii) a combination thereof.

87. The multispecific molecule of claim 82, wherein the anti-CCR2 binding moiety comprises a VH and a VL comprising the amino acid sequences of: SEQ ID NOs: 343 and 345, respectively, or SEQ ID NOs: 344 and 345, respectively.

88. The multispecific molecule of claim 82, wherein the anti-CCR2 binding moiety does not comprise a VH comprising the amino acid sequence of SEQ ID NO: 480, a VL comprising the amino acid sequence of SEQ ID NO: 481, or a combination thereof.

89. The multispecific molecule of claim 82, comprising an amino acid sequence having at least 80% sequence identity to any one sequence selected from the group consisting of SEQ ID NOs: 373, 136, 131, and 127, or an amino acid sequence encoded by a nucleotide sequence having at least 80% sequence identity to any one sequence selected from the group consisting of SEQ ID NOs: 134, 137, 132, and 128.

90. The multispecific molecule of claim 82, comprising:
(i) the amino acid sequence of SEQ ID NO: 127, the amino acid sequence of SEQ ID NO: 131, and the amino acid sequence of SEQ ID NO: 373; or
(ii) the amino acid sequence of SEQ ID NO: 136, the amino acid sequence of SEQ ID NO: 131, and the amino acid sequence of SEQ ID NO: 373.

91. The multispecific molecule of claim 82, wherein the TGF-beta inhibitor comprises a TGFBR1 polypeptide, a TGFBR2 polypeptide, a TGFBR3 polypeptide, or any combination thereof.

92. The multispecific molecule of claim 91, wherein:
(a) the TGFBR1 polypeptide comprises:
(i) an extracellular domain of TGFBR1 or a functional variant thereof,
(ii) a sequence having at least 80% sequence identity to an extracellular domain of SEQ ID NO: 95, 96, 97, 120, 121, or 122; or
(iii) a sequence having at least 80% sequence identity to the sequence of SEQ ID NO: 104 or SEQ ID NO: 105;
(b) the TGFBR2 polypeptide comprises:
(i) an extracellular domain of TGFBR2 or a functional variant thereof,
(ii) a sequence having at least 80% sequence identity to an extracellular domain of SEQ ID NO: 98, 99, 123, or 124; or
(iii) a sequence having at least 80% sequence identity to any one sequence selected from the group consisting of SEQ ID NOs: 100, 101, 102, and 103;
(c) a TGFBR3 polypeptide, wherein the TGFBR3 polypeptide comprises:
(i) an extracellular domain of TGFBR3 or a functional variant thereof,
(ii) a sequence having at least 80% sequence identity to an extracellular domain of SEQ ID NO: 106, 107, 125, or 126; or
(iii) a sequence having at least 80% sequence identity to the sequence of SEQ ID NO: 108; or
(d) any combination thereof.

93. The multispecific molecule of claim 91,
wherein the TGF-beta inhibitor comprises a first TGF-beta receptor polypeptide and a second TGF-beta receptor polypeptide, and
wherein the first TGF-beta receptor polypeptide and the second TGF-beta receptor polypeptide form:
(a) a homodimer, and the first TGF-beta receptor polypeptide and the second TGF-beta receptor polypeptide are:
(i) two TGFBR1 (TGF beta receptor 1) polypeptides that form a homodimer,
(ii) two TGFBR2 (TGF beta receptor 2) polypeptides that form a homodimer, or
(iii) two TGFBR3 (TGF beta receptor 3) polypeptides that form a homodimer; or
(b) a heterodimer, and the first TGF-beta receptor polypeptide and the second TGF-beta receptor polypeptide are:
(i) a TGFBR1 polypeptide and a TGFBR2 polypeptide that form a heterodimer,
(ii) a TGFBR1 polypeptide and a TGFBR3 polypeptide that form a heterodimer, or
(iii) a TGFBR2 polypeptide and a TGFBR3 polypeptide that form a heterodimer.

94. The multispecific molecule of claim 82,
wherein the TGF-beta inhibitor comprises a first TGF-beta receptor polypeptide and a second TGF-beta receptor polypeptide,
wherein the multispecific molecule comprises a first Fc region and a second Fc region, and wherein:
(i) the first TGF-beta receptor polypeptide is linked to the first Fc region, and
(ii) the second TGF-beta receptor polypeptide is linked to the second Fc region.

95. The multispecific molecule of claim 94, wherein:
(i) the first TGF-beta receptor polypeptide is linked to the C-terminus or the N-terminus of the first Fc region,
(ii) the second TGF-beta receptor polypeptide is linked to the C-terminus or the N-terminus of the second Fc region, or
(iii) a combination thereof.

96. The multispecific molecule of claim 94, wherein:
(i) the first TGF-beta receptor polypeptide is linked to the first Fc region via a linker,
(ii) the second TGF-beta receptor polypeptide is linked to the second Fc region via a linker, or
(iii) a combination thereof.

97. The multispecific molecule of claim 94, wherein the multispecific molecule comprises:
(i) the amino acid sequences of SEQ ID NO: 192 and SEQ ID NO: 193,
(ii) the amino acid sequences of SEQ ID NO: 192 and SEQ ID NO: 195,
(iii) the amino acid sequences of SEQ ID NO: 194 and SEQ ID NO: 193, or
(iv) the amino acid sequences of SEQ ID NO: 194 and SEQ ID NO: 195.

98. The multispecific molecule of claim 82,
wherein the TGF-beta inhibitor comprises a first TGF-beta receptor polypeptide and a second TGF-beta receptor polypeptide,
wherein the multispecific molecule comprises a heavy chain constant region 1 (CH1) and a light chain constant region (CL), and
wherein:
(i) the first TGF-beta receptor polypeptide is linked to the CH1, and
(ii) the second TGF-beta receptor polypeptide is linked to the CL.

99. The multispecific molecule of claim 98, wherein:
(i) the first TGF-beta receptor polypeptide is linked to the N-terminus or the C-terminus of the CH1;
(ii) the second TGF-beta receptor polypeptide is linked the N-terminus or the C-terminus of the CL, or
(iii) a combination thereof.

100. The multispecific molecule of claim 98, wherein:
(i) the first TGF-beta receptor polypeptide is linked to the CH1 via a linker,
(ii) the second TGF-beta receptor polypeptide is linked to the CL via a linker, or
(iii) a combination thereof.

101. The multispecific molecule of claim 98, wherein the multispecific molecule comprises:
(i) the amino acid sequences of SEQ ID NO: 196 and SEQ ID NO: 198,
(ii) the amino acid sequences of SEQ ID NO: 196 and SEQ ID NO: 199,
(iii) the amino acid sequences of SEQ ID NO: 197 and SEQ ID NO: 198, or
(iv) the amino acid sequences of SEQ ID NO: 197 and SEQ ID NO: 199.

102. The multispecific molecule of claim 82, wherein:
(i) the TGF inhibitor is linked to the anti-CSF1R binding moiety or the anti-CCR2 binding moiety;
(ii) the anti-CSF1R binding moiety, the anti-CCR2 binding moiety, or a combination thereof comprises an Fc region, wherein the TGF inhibitor is linked to the Fc region;
(iii) the multispecific molecule comprises a first TGF-beta inhibitor and a second TGF-beta inhibitor, wherein the first TGF-beta inhibitor is linked to the anti-CSF1R binding moiety, and the second TGF-beta inhibitor is linked to the anti-CCR2 binding moiety;
(iv) the multispecific molecule comprises a first TGF-beta inhibitor and a second TGF-beta inhibitor,
wherein the anti-CSF1R binding moiety comprises a first Fc region, and the anti-CCR2 binding moiety comprises a second Fc region, and
wherein the first TGF-beta inhibitor is linked to the first Fc region, and the second TGF-beta inhibitor is linked to the second Fc region; or
(v) the multispecific molecule comprises a first TGF-beta inhibitor and a second TGF-beta inhibitor,
wherein the anti-CSF1R binding moiety comprises a first light chain and a first heavy chain,
wherein the first heavy chain comprises a first Fc region, and
wherein the first TGF-beta inhibitor is linked to the first Fc region; and
wherein the anti-CCR2 binding moiety comprises a second light chain and a second heavy chain,
wherein the second heavy chain comprises a second Fc region, and
wherein the second TGF-beta inhibitor is linked to the second Fc region.

103. The multispecific molecule of claim 102, wherein:
(i) the TGF inhibitor is linked to the C-terminus or the N-terminus of the anti-CSF1R binding moiety or the C-terminus or the N-terminus of the anti-CCR2 binding moiety;
(ii) the TGF inhibitor is linked to the C-terminus or the N-terminus of the Fc region of the anti-CSF1R binding moiety or the C-terminus or the N-terminus of the Fc region of the anti-CCR2 binding moiety;
(iii) the first TGF-beta inhibitor is linked to the C-terminus or the N-terminus of the anti-CSF1R binding moiety, the C-terminus or the N-terminus of the second TGF-beta inhibitor is linked to the anti-CCR2 binding moiety, or a combination thereof;
(iv) the first TGF-beta inhibitor is linked to the C-terminus or the N-terminus of the first Fc region of the anti-CSF1R binding moiety, the second TGF-beta inhibitor is linked to the C-terminus or the N-terminus of the second Fc region of the anti-CCR2 binding moiety, or a combination thereof; or
(v) the first TGF-beta inhibitor is linked to the C-terminus or the N-terminus of the first Fc region of the first heavy chain, the second TGF-beta inhibitor is linked to the C-terminus or the N-terminus of the second Fc region of the second heavy chain, or a combination thereof.

104. The multispecific molecule of claim 102, wherein:
(i) the TGF inhibitor is linked to the anti-CSF1R binding moiety or the anti-CCR2 binding moiety via a linker;
(ii) the TGF inhibitor is linked to the Fc region of the anti-CSF1R binding moiety or the Fc region of the anti-CCR2 binding moiety via a linker,
(iii) the first TGF-beta inhibitor is linked to the anti-CSF1R binding moiety via a linker, the second TGF-beta inhibitor is linked to the anti-CCR2 binding moiety via a linker, or a combination thereof;
(iv) the first TGF-beta inhibitor is linked to the first Fc region of the anti-CSF1R binding moiety via a linker, the second TGF-beta inhibitor is linked to the second Fc region of the anti-CCR2 binding moiety via a linker, or a combination thereof; or
(v) the first TGF-beta inhibitor is linked to the first Fc region of the first heavy chain via a linker, the second TGF-beta inhibitor is linked to the second Fc region of the second heavy chain via a linker, or a combination thereof.

105. A recombinant polynucleotide comprising a sequence encoding the multispecific molecule of claim 82.

106. A pharmaceutical composition comprising the multispecific molecule of claim 82, and a pharmaceutically acceptable carrier, excipient, or stabilizer.

107. A method of treating a cancer in a subject in need thereof, comprising administering to the subject the pharmaceutical composition of claim 106, wherein the pharmaceutical composition is administered in an amount effective to treat the cancer.

108. An antibody molecule that binds to CSF1R, comprising:
(a) a heavy chain variable region (VH) comprising a heavy chain complementarity determining region 1 (HCDR1), a HCDR2, and a HCDR3, and a light chain variable region (VL) comprising a light chain complementarity determining region 1 (LCDR1), a LCDR2, and a LCDR3,
wherein the HCDR1, the HCDR2, the HCDR3, the LCDR1, the LCDR2, and the LCDR3 comprise:
(i) the amino acid sequences of SEQ ID NOs: 402, 474, 475, 432, 434, and 436, respectively;
(ii) the amino acid sequences of SEQ ID NOs: 402, 474, 475, 433, 435, and 437, respectively;
(iii) the amino acid sequences of SEQ ID NOs: 403, 478, 479, 433, 435, and 437, respectively;
(iv) the amino acid sequences of SEQ ID NOs: 403, 478, 479, 432, 434, and 436, respectively;
(v) the amino acid sequences of SEQ ID NOs: 402, 405, 413, 432, 434, and 436, respectively; or
(vi) the amino acid sequences of SEQ ID NOs: 403, 411, 422, 433, 435, and 437, respectively; or
(b) (i) a VH comprising an amino acid sequence having at least 80% sequence identity to the sequence of SEQ ID NO: 324, and a VL comprising an amino acid sequence having at least 80% sequence identity to the sequence of SEQ ID NO: 341; or
(ii) a VH comprising an amino acid sequence having at least 80% sequence identity to the sequence of SEQ ID NO: 339, and a VL comprising an amino acid sequence having at least 80% sequence identity to the sequence of SEQ ID NOs: 139.

109. An antibody molecule that binds to CCR2, comprising:
(a) a heavy chain variable region (VH) comprising a heavy chain complementarity determining region 1 (HCDR1), a HCDR2, and a HCDR3, and a light chain variable region (VL) comprising a light chain complementarity determining region 1 (LCDR1), a LCDR2, and a LCDR3,
wherein the HCDR1, the HCDR2, the HCDR3, the LCDR1, the LCDR2, and the LCDR3 comprise the amino acid sequences of SEQ ID NOs: 446, 447, 448, 454, 455, and 456, respectively, and
wherein:
(i) the VH does not comprise the amino acid sequence of SEQ ID NO: 480,
(ii) the VL does not comprise the amino acid sequence of SEQ ID NO: 481, or
(iii) a combination thereof; or
(b) a VH comprising an amino acid sequence having at least 90% sequence identity to the sequence of SEQ ID NO: 343, and a VL comprising an amino acid sequence having at least 90% sequence identity to the sequence of SEQ ID NO: 345.
